(19) United States
(12) Patent Application Publication
(10) Pub. No.: US 2021/0238260 A1
(43) Pub. Date: Aug. 5, 2021

(54) GENE THERAPY FOR HEMOPHILIA B WITH A CHIMERIC AAV CAPSID VECTOR ENCODING MODIFIED FACTOR IX POLYPEPTIDES

(71) Applicants: CATALYST BIOSCIENCES, INC., South San Francisco, CA (US); THE BOARD OF TRUSTEES OF THE LELAND STANFORD JUNIOR UNIVERSITY, Stanford, CA (US)

(72) Inventors: Grant E. Blouse, Burlingame, CA (US); Katja Pekrun, Palo Alto, CA (US); Mark A. Kay, Los Altos, CA (US)

(21) Appl. No.: 17/161,602

(22) Filed: Jan. 28, 2021

Related U.S. Application Data
(63) Continuation of application No. PCT/US2020/065431, filed on Dec. 16, 2020.
(60) Provisional application No. 63/045,010, filed on Jun. 26, 2020.
(60) Provisional application No. 62/967,568, filed on Jan. 29, 2020.
(60) Provisional application No. 63/045,010, filed on Jun. 26, 2020.
(60) Provisional application No. 62/967,568, filed on Jan. 29, 2020.

(51) Int. Cl. C07K 14/745; C12N 15/86; A61P 7/04

(52) U.S. Cl. CPC C07K 14/745; C12N 15/86; A61K 38/00; C12N 2750/14143; C12N 2830/42; A61P 7/04

(57) ABSTRACT

AAV vectors that encode a modified Factor IX (FIX) polypeptide for gene therapy for treatment of hemophilia B are provided. The modified FIX polypeptide has increased potency compared to the wild-type FIX polypeptide. The nucleic acid encoding the modified FIX polypeptide includes a portion of an intron. The AAV vectors were generated and selected to infect islet cells, but were found to effectively transduce hepatocytes upon systemic administration, and to express high levels of FIX polypeptide. Relatively low doses of the AAV vectors can be administered to achieve a therapeutic effect. The gene therapy treatment can result in normal or near normal coagulation pharmacokinetics and normal levels of FIX, or mild hemophilia B. Combining an AAV vector with improved properties for transducing hepatocytes, and modified FIX polypeptides with enhanced potency, improves transgene expression and effectively lowers the viral dose needed to achieve therapeutically relevant FIX activity levels.

### RELATED PATENTS AND APPLICATIONS

[0001] This application is a continuation of International PCT Application No. PCT/US2020/065431, filed Dec. 16, 2020, entitled “GENE THERAPY FOR HEMOPHILIA B WITH A CHIMERIC AAV CAPSID VECTOR ENCODING MODIFIED FACTOR IX POLYPEPTIDES,” to Applicants Catalyst Biosciences, Inc., and The Board Of Trustees Of The Leland Stanford Junior University, and inventors Grant E. Blouse, Katja Pekrun, and Mark A. Kay.

[0002] Benefit of priority is claimed to International PCT Application No. PCT/US2020/065431, which claims benefit of priority, as does this application, to U.S. Provisional Application No. 63/045,010, filed Jun. 26, 2020, entitled “GENE THERAPY FOR HEMOPHILIA B WITH A CHIMERIC AAV CAPSID VECTOR ENCODING MODIFIED FACTOR IX POLYPEPTIDES,” to Applicants Catalyst Biosciences, Inc., and The Board Of Trustees Of The Leland Stanford Junior University, and inventors Grant E. Blouse, Katja Pekrun, and Mark A. Kay.

[0003] International PCT Application No. PCT/US2020/065431 also claims benefit of priority, as does this application, to U.S. Provisional Application No. 62/967,568, filed Jan. 29, 2020, entitled “GENE THERAPY FOR HEMOPHILIA B WITH A CHIMERIC AAV CAPSID VECTOR ENCODING MODIFIED FACTOR IX POLYPEPTIDES,” to Applicants Catalyst Biosciences, Inc., and The Board of Trustees of The Leland Stanford Junior University, and inventors Grant E. Blouse, Katja Pekrun, and Mark A. Kay.

[0004] This application is related to U.S. Pat. No. 9,328,339, issued May 3, 2016, which is based on U.S. application Ser. No. 14/267,754, filed May 1, 2014, and is related to U.S. Pat. No. 8,778,870, issued Jul. 15, 2014, which is based on U.S. application Ser. No. 13/373,118, filed Nov. 3, 2011, each entitled “MODIFIED FACTOR IX POLYPEPTIDES AND USES THEREOF,” and each to Applicant Catalyst Biosciences, Inc., and inventors Edwin L. Madison, Christopher Thanos, and Grant Ellsworth Blouse.

[0005] This application also is related to International PCT Application No. PCT/US2019/025026, filed Mar. 29, 2019, and published as International PCT Application Publication No. WO 2019/191701 on Oct. 3, 2019, and to corresponding U.S. application Ser. No. 16/370,735, filed Mar. 29, 2019, and published as U.S. Patent Application Publication No. US 2020/0024616 A1 on Jan. 23, 2020, each entitled “NOVEL RECOMBINANT ADENO-ASSOCIATED VIRUS CAPSIDS WITH ENHANCED HUMAN PANCREATIC TROPISM,” and each to Applicant The Board of Trustees of The Leland Stanford Junior University, and inventors Katja Pekrun and Mark A. Kay.

[0006] The subject matter of each of the above-referenced patents, applications, and publications, including the sequence listings, is incorporated by reference in its entirety.

### INCORPORATION BY REFERENCE OF SEQUENCE LISTING FILED ELECTRONICALLY

[0007] An electronic version of the Sequence Listing is filed herewith, the contents of which are incorporated by reference in their entirety. The electronic file was created on Jan. 27, 2020, is 1.603 megabytes in size, and is titled 4956SEQ001.TXT.

### FIELD OF INVENTION

[0008] Provided are vectors and gene therapy methods for treatment of hemophilia, particularly hemophilia B. The vectors encode modified FIX polypeptides that have enhanced potency.

### BACKGROUND

[0009] Recombinantly produced Factor IX (FIX) polypeptides have been approved for the treatment of hemophilia, in particular, hemophilia B. Also of therapeutic interest are FIX polypeptides that exhibit anticoagulant activities useful in the treatment of thrombolytic diseases. Hence, FIX polypeptides, like other coagulation factors, are important therapeutic agents for procoagulant therapies. While a goal of coagulation therapy is to eliminate bleeds and the adverse consequences of bleeds, it is difficult to achieve. Hence, there is a need for FIX prophylactic therapies and FIX polypeptides for prophylactic use, particularly for effective gene therapy vectors for delivery of FIX polypeptides.

### SUMMARY

[0010] Provided are adeno-associated virus (AAV) vectors for gene therapy for the treatment of hemophilia, particularly hemophilia B. The vectors contain chimeric capsids that have increased tropism for the liver compared to wild-type capsids, and contain nucleic acid encoding a modified Factor IX (FIX) polypeptide. The nucleic acid encoding the FIX polypeptide that is encapsulated in the vector includes an intron. The intron can be the first intron or portion thereof from a gene encoding a FIX polypeptide, such as human FIX, such as the human FIX polypeptide set forth in SEQ ID NO: 2 or 325 (mature forms of human FIX are set forth in SEQ ID NOS: 3 and 20, respectively).

[0011] The vectors contain nucleic acid constructs. Provided are nucleic acid constructs that contain inverted terminal repeats (ITRs) from an adeno-associated virus, flanking nucleic acid encoding a modified FIX polypeptide, where: the encoded modified FIX polypeptide comprises all or a portion of a FIX gene intron; the encoded modified FIX polypeptide comprises one or more of an insertion, deletion, and replacement of amino acids; and the encoded modified FIX polypeptide, when in activated form, has coagulation activity of at least about 7-10 times the coagulation activity of the activated form of the wild-type FIX polypeptide of SEQ ID NO: 3 or 20. The encoded modified FIX polypeptide that only has the amino acid replacement R338L generally is not a nucleic acid construct provided herein, but a nucleic acid construct that is encapsulated in the chimeric capsids described herein that have increased tropism for the liver.

[0012] The chimeric capsids provided herein may comprise sequences from wild-type AAV serotypes. In some examples, the chimeric capsid comprises a mixture of sequences from wild-type AAV serotypes, such as a sequence of two or more AAV serotypes, including AAV1, AAV6, AAV3B, and AAV8. The chimeric capsids transduce hepatocytes with greater efficiency or to a greater extent than any of AAV1, AAV6, AAV3B, and/or AAV8. As a result, the amount of total AAV vector administered to a subject can be lower than the amount of AAV1, AAV6, AAV3B, or AAV8 that would have to be administered to have the same amount of vector or vector genome introduced into the liver, or to obtain a similar therapeutic effect.

[0013] Also provided are AAV vectors that contain a capsid designated LK03 of SEQ ID NO:429, or a capsid having at least 95%, 96%, 97%, 98%, or 99% sequence identity therewith; and a nucleic acid construct that encodes a modified FIX polypeptide encapsulated in the capsid, where: the nucleic acid construct comprises inverted terminal repeats (ITRs) from an adeno-associated virus flanking nucleic acid encoding the modified FIX polypeptide; the nucleic acid encoding the modified FIX polypeptide comprises all or a portion of a FIX gene intron; the intron is all or a portion of the first intron of human FIX (hFIX), and the portion is sufficient to increase expression of the encoded FIX polypeptide in a human cell or human to whom the construct is administered for gene therapy; the encoded modified FIX polypeptide comprises one or more of an insertion, deletion, and replacement of amino acids; and the encoded modified FIX polypeptide, when in activated form, has coagulation activity of at least about 7-10 times the activity of the activated form of wild-type FIX of SEQ ID NO:3 or SEQ ID NO:20. In some embodiments, the intron is all or a portion of the first intron of human FIX (hFIX), wherein the portion is sufficient to increase expression of the encoded FIX polypeptide in a human cell or human to whom the construct is administered for gene therapy. For example, the first intron of FIX can comprise the sequence of nucleotides set forth in SEQ ID NO:434, or a sequence having at least 95% or 98% sequence identity therewith. The intron can be inserted after or downstream from nucleic acid encoding the signal sequence, in the nucleic acid encoding the modified FIX polypeptide. For example, the intron is inserted between nucleotides encoding amino acid residues corresponding to residues 29 and 30 of the unmodified FIX polypeptide of SEQ ID NO:2, where corresponding residues are identified by alignment with SEQ ID NO:2 or SEQ ID NO:3.

[0014] The AAV vectors contain, for example, a portion of the intron, or comprise at least 10%, at least 12%, at least 15%, at least 16%, or at least 20% of the intron or of the sequence having at least 98% sequence identity therewith, whereby expression of the encoded FIX polypeptide is increased in a human cell or human compared to expression of the FIX polypeptide without the intron. In some embodiments, the intron has the sequence of nucleotides set forth in SEQ ID NO:433, or a sequence that has at least 98% sequence identity therewith. In some embodiments, the intron or portion thereof is inserted between the nucleotides encoding amino acid residues corresponding to residues 29 and 30 of the unmodified FIX polypeptide of SEQ ID NO:2, and corresponding residues are identified by alignment with SEQ ID NO:2 or SEQ ID NO:3.

[0015] Among the AAV vectors provided herein, including those with the recombinant adeno-associated viral (rAAV) vectors with LK03, KP-1, KP-2, and KP-3 capsids, are those in which the encoded modified FIX polypeptide, when in activated form, has at least greater than 7-fold, greater than 10-fold, greater than 15-fold, or greater than 20-fold activity, compared to the activity of the activated form of the wild-type FIX of SEQ ID NO: 2, 3, 20, or 325. In the AAV vectors herein, including those with the LK03, KP-1, KP-2, and KP-3 capsids, the construct contains nucleic acid encoding the FIX signal sequence or other suitable heterologous signal sequence, the first residue of the propeptide, the intron, and the remaining residues of the FIX polypeptide, including the remaining residues of the propeptide and mature FIX polypeptide. The AAV vectors herein, including those packaged in the capsids LK03, KP-1, KP-2, and KP-3, encode modified FIX polypeptides, and include a construct, with reference to the unmodified FIX polypeptide of SEQ ID NO:2, that comprises, in the following order: nucleic acid encoding the signal sequence, residue 1 of the propeptide, the intron or portion thereof, residues 2-46 of the propeptide, and residues corresponding to residues 47-461 of the mature FIX polypeptide, where residue positions are determined by alignment with SEQ ID NO:2. Modified FIX includes the modified FIX polypeptide that comprises the sequence of amino acids set forth in SEQ ID NO:394. The modified FIX polypeptide encoded in the AAV vector includes a signal sequence, the intron, and the mature modified FIX polypeptide, as described herein. The modified FIX polypeptides, and the modified FIX polypeptides including the intron and signal sequence, can be encoded by nucleotides optimized for expression in mammals, particularly rodents, such as mice, and/or primates, such as humans. The optimized codons can be modified to also reduce or eliminate CpG islands for expression in primates, such as humans. Exemplary codon-optimized modified FIX polypeptide sequences include those set forth in any of SEQ ID NOs: 562-564 and 569-571, such as the sequence of nucleotides set forth in SEQ ID NO:570 or SEQ ID NO:571. Those of skill in the art can further optimize sequences as appropriate.

[0016] Provided are nucleic acid constructs for packaging in the capsids provided herein. The nucleic acid constructs include an intron, such as all or a portion of the first intron of human FIX (hFIX), wherein the portion is sufficient to increase expression of the encoded modified FIX polypeptide in a human cell or human to whom the construct is administered for gene therapy. Exemplary of such introns is the first intron of FIX that comprises the sequence of nucleotides set forth in SEQ ID NO:434, or a sequence having at least 95% or 98% sequence identity therewith. The portion includes at least or at least about 10%, at least 15%, at least 16%, or at least 20% of the intron or of the sequence having at least 95% or 98% sequence identity therewith, whereby expression of the encoded modified FIX polypeptide is increased in a human cell or human compared to expression of the FIX polypeptide without the intron. An exemplary partial intron is one having the sequence of nucleotides set forth in SEQ ID NO:433, or a sequence having at least 98% sequence identity therewith. The intron can consist of the sequence of nucleotides set forth in SEQ ID NO:433. The intron can be inserted at a site such that the expression of the encoded modified FIX polypeptide is increased compared to expression in the absence of any intron. For example, the intron can be inserted between nucleic acids encoding amino acid residues corresponding to residues 29 and 30 of the unmodified FIX polypeptide of SEQ ID NO:2, where corresponding residues are identified by alignment with SEQ ID NO:2 or SEQ ID NO:3.

[0017] The nucleic acid constructs for packaging in the capsids described herein can include any encoding a modified FIX polypeptide that, when in activated form, has at least greater than 7-fold, greater than 10-fold, greater than 15-fold, or greater than 20-fold activity, compared to the activity of the activated form of the wild-type FIX of SEQ ID NO: 2, 3, 20 or 325. An exemplary construct is one that contains nucleic acid encoding the FIX signal sequence, the first residue of the propeptide, the intron, the remaining residues of the FIX polypeptide, including the remaining residues of the propeptide and mature FIX, such as a construct, with reference (for alignment) to the unmodified FIX of SEQ ID NO:2, that includes the signal sequence (residues 1-28), residue 1 of the propeptide, the intron, residues 2-46 of the propeptide, and residues 47-461 of mature FIX, wherein residue positions are determined by alignment with SEQ ID NO:2. Exemplary of the modified FIX polypeptides that have improved properties (increased activity and/or potency) is the polypeptide whose sequence of the mature form is set forth in SEQ ID NO:394 (or the same sequence in which the residue at T148 is T148A (SEQ ID NO:486)). Among the constructs provided herein are those that comprise the sequences of nucleotides set forth in any of SEQ ID NOS: 562-564 and 569-571, and further optimized forms thereof, such as by elimination or reduction of CpG islands, which can increase expression in primates, such as humans.

[0018] For the modified FIX polypeptides described herein, the codons (in upper case letters) encoding the mutations were introduced with the following primers (it is understood that the skilled person can substitute other degenerate codons, including any that are optimized for expression in a human):

| | | SEQ |
|---|---|---|
| Primer Name | Primer Sequence (5′ to 3′) | ID NO. |
| F9-A[103]N/ | gtaaaaatagtAATgatAGCaaggtggtttg | 28 |
| N[105]S-For | | |
| F9-D[104]N/ | gtaaaaatagtgctAATaacAGTgtggtttgctoctgtactg | 29 |
| K[106]S-For | | |
| F9-K[106]N/ | gtgctgataacAATgtgAGTtgctoctgtactg | 30 |
| V[108]S-For | | |
| F9-D[85]N-For | gaactgtgaattaAATgtaacatgtaac | 31 |
| F9-T[148]A-For | ctcacccgtgctgagGCTgtttttcctgatgtg | 32 |
| F9-D39N/F41T-For | gaatggtaaagttAATgcaACCtgtggaggctctatc | 33 |
| F9-K63N-For | gaaactggtgttAACattacagttgtcgc | 34 |
| F9-I86S-For | gcgaaatgtgAGTcgaattattcctc | 35 |
| F9-A95bS-For | caactacaatgcaAGTattaataagtacaac | 36 |
| F9-K243N-For | aaggaaaaaacaAATctcacttaagtgctagctg | 37 |
| F9-E240N-For | ctggattaagAATaaaacaaagctc | 38 |
| F9-E74N-For | caggtgaacataatattAACgagacagaacatacag | 39 |
| F9-T76N/H78S-For | gaacataatattgaggagAACgaaAGTacagagcaaaag | 40 |
| F9-K82N/N845-For | cagaacatacagagcaaAATcgaTCTgtgattcgaattattc | 41 |
| F9-L153N-For | gggagatcagctAATgttcttcagtac | 42 |
| F9-F145N/H1475- | ctggggaagagtcAACTCCaaagggagatcag | 43 |
| For | | |
| F9-K222N/K2245- | gagtgtgcaatgAACggcTCAtatggaatatatac | 44 |
| For | | |
| F9-S151N/L1535- | cttccacaaagggagaAATgctTCAgttcttca | 45 |
| For | | |
| F9-N95S-For | cctcaccacaactacAGTgcagctattaataagtacaacc | 46 |
| F9-Y117N-For | cttagtgctaaacagcAACgttacacctatttgc | 47 |
| F9-G149N-For | ggaagagtcttccacaaaAACagatcagctttagttc | 48 |
| F9-R150N/A152S- | gtcttccacaaagggAACtcaTCTttagttcttcagtac | 49 |
| For | | |
| F9-R150A-For | gtcttccacaaagggGCAtcagctttagttcttcag | 50 |
| F9-R150E-For | gtcttccacaaagggGAAtcagctttagttcttcag | 51 |
| F9-R150Y-For | gtcttccacaaagggTACtcagctttagttcttcag | 52 |
| F9-R143Q-For | gtaagtggctggggaCAAgtcttccacaaaggg | 53 |
| F9-R143A-For | gtaagtggctggggaGCAgtcttccacaaaggg | 54 |
| F9-R143Y-For | gtaagtggctggggaTACgtcttccacaaaggg | 55 |
| F9-R143L-For | gtaagtggctggggaCTGgtcttccacaaaggg | 56 |
| F9-V38M-For | gttttgaatggtaaaATGgatgcattctgtggaggc | 57 |
| F9-V38Y-For | gttttgaatggtaaaTACgatgcattctgtggaggc | 58 |
| F9-D39M-For | gttttgaatggtaaagttATGgcattctgtggaggc | 59 |
| F9-D39Y-For | gttttgaatggtaaagttTACgcattctgtggaggc | 60 |
| F9-A40M-For | gttttgaatggtaaagttgatATGttctgtggaggctctatc | 61 |
| F9-A40Y-For | gttttgaatggtaaagttgatTACttctgtggaggctctatc | 62 |
| F9-R233A/K230A- | caaatatggaatatataccGCAgtatccGCAtatgtcaactgg | 63 |
| For | attaag | |
| F9-R233E/K230E- | caaatatggaatatataccGAAgtatccGAAtatgtcaactgg | 64 |
| For | attaag | |
| F9-R233A-For | gaatatataccaaggtatccGCAtatgtcaactggattaag | 65 |
| F9-R233E-For | gaatatataccaaggtatccGAAtatgtcaactggattaag | 66 |
| F9-K230A-For | caaatatggaatatataccGCAgtatcccggtatgtc | 67 |
| F9-K230E-For | caaatatggaatatataccGAAgtatcccggtatgtc | 68 |
| F9-K126E-For | cctatttgcattgctgacGAAgaatacacgaacatc | 69 |
| F9-K126A-For | cctatttgcattgctgacGCAgaatacacgaacatc | 70 |
| F9-R165A-For | gttccacttgttgacGCAgccacatgtcttcgatct | 71 |
| F9-R165E-For | gttccacttgttgacGAAgccacatgtcttcgatct | 72 |
| F9-R170A-For | cgagccacatgtcttGCAtctacaaagttcacc | 73 |
| F9-R170E-For | cgagccacatgtcttGAAtctacaaagttcacc | 74 |
| F9-D[64]N-For | ggcggcagttgcaagAACgacattaattcctatG | 273 |
| F9-D[64]A-For | ggcggcagttgcaagGCTgacattaattcctatG | 274 |
| F9-N[157]Q-For | cctgatgtggactatgtaCAGtctactgaagctgaaacc | 275 |
| F9-N[157]D-For | cctgatgtggactatgtaGACtctactgaagctgaaacc | 276 |
| F9-N[167]Q-For | gaaaccattttggatCAGatcactcaaagcacc | 277 |
| F9-N[167]D-For | gaaaccattttggatGACatcactcaaagcacc | 278 |
| F9-S[61]A-For | ccatgtttaaatggcggcGCTtgcaaggatgacattaattcc | 279 |
| F9-S[53]A-For | gatggagatcagtgtgagGCTaatccatgtttaaatggc | 280 |
| F9-T[159]A-For | gtggactatgtaaattctGCTgaagctgaaaccattttg | 281 |
| F9-T[169]A-For | CattttggataacatcGCTcaaagcacccaatcatttaatgac | 282 |
| F9-T[172]A-For | gataacatcactcaaagcGCTcaatcatttaatgac | 283 |
| F9-T[179]A-For | caatcatttaatgacttcGCTcgggttgttggtggagaaG | 284 |
| F9-Y[155]F-For | gtttttcctgatgtggacTTCgtaaattctactgaagctG | 285 |
| F9-Y[155]H-For | gtttttcctgatgtggacCACgtaaattctactgaagctG | 286 |
| F9-Y[155]Q-For | gtttttcctgatgtggacCAGgtaaattctactgaagctG | 287 |
| F9-S[158]A-For | gtggactatgtaaatGCTactgaagctgaaacc | 288 |
| F9-S[158]D-For | gtggactatgtaaatGACactgaagctgaaacc | 289 |
| F9-S[158]E-For | gtggactatgtaaatGAGactgaagctgaaacc | 290 |
| F9-R165S-For | gttccacttgttgacAGCgccacatgtcttcgatct | 291 |
| F9-R170L-For | cgagccacatgtcttCTGtctacaaagttcacc | 292 |
| F9-K148N-For | ggaagagtcttccacAACgggagatcagctttaG | 293 |
| F9-K148A-For | ggaagagtcttccacGCTgggagatcagctttaG | 294 |
| F9-K148E-For | ggaagagtcttccacGAGgggagatcagctttaG | 295 |
| F9-K148S-For | ggaagagtcttccacAGCgggagatcagctttaG | 296 |
| F9-K148M-For | ggaagagtcttccacATGgggagatcagctttaG | 297 |
| F9-E745-For | ggtgaacataatattAGCgagacagaacatacaG | 298 |
| F9-E74A-For | ggtgaacataatattGCTgagacagaacatacaG | 299 |
| F9-E74R-For | ggtgaacataatattAGGgagacagaacatacaG | 300 |
| F9-E74K-For | ggtgaacataatattAAGgagacagaacatacaG | 301 |
| F9-H92F-For-Corr | cgaattattcctcacTTCaactacaatgcaGC | 302 |
| F9-H92Y-For-Corr | cgaattattcctcacTACaactacaatgcaGC | 303 |
| F9-H92E-For-Corr | cgaattattcctcacGAAaactacaatgcaGC | 304 |
| F9-H92S-For-Corr | cgaattattcctcacAGCaactacaatgcaGC | 305 |
| F9-T242A-For | CtggattaaggaaaaaGCTaagctcacttaagtg | 306 |
| F9-T242V-For | CtggattaaggaaaaaGTGaagctcacttaagtg | 307 |
| F9-E240N/T242A- | gtcaactggattaagAACaaaGCTaagctcacttaagtg | 308 |
| For | | |
| F9-E240N/T242V- | gtcaactggattaagAACaaaGTGaagctcacttaagtg | 309 |
| For | | |
| F9-E240Q-For | gtcaactggattaagCAGaaaacaaagctcacttaaG | 310 |
| F9-E240S-For | gtcaactggattaagAGCaaaacaaagctcacttaaG | 311 |
| F9-E240A-For | gtcaactggattaagGCTaaaacaaagctcacttaaG | 312 |
| F9-E240D-For | gtcaactggattaagGACaaaacaaagctcacttaaG | 313 |
| F9-N178D-For | CAaagttcaccatctatGACaacatgttctgtgctggc | 314 |
| F9-N178Y-For | CAaagttcaccatctatTACaacatgttctgtgctggc | 315 |
| F9-Y177A-For | CTacaaagttcaccatcGCTaacaacatgttctgtGC | 316 |
| F9-Y177T-For | CTacaaagttcaccatcACCaacaacatgttctgtGC | 317 |
| F9-T175R-For | cttcgatctacaaagttcAGGatctataacaacatgttc | 318 |
| F9-T175E-For | cttcgatctacaaagttcGAAatctataacaacatgttc | 319 |
| F9-T175Q-For | cttcgatctacaaagttcCAGatctataacaacatgttc | 320 |
| F9-F174I-For | GTcttcgatctacaaagATCaccatctataacaacatg | 321 |
| F9-T175R/Y177T- | cgatctacaaagttcAGGatcACCaacaacatgttctgtG | 322 |
| For | | |
| F9-Y94F/K98T-For | GAattattcctcaccacaacTTCaatgcagctattaatACCta | 323 |
| | caaccatgacattG | |
| F9-F145N/K148S-For | ggctggggaagagtcAACcacAGCgggagatcagctttaG | 324 |

[0019] In one example, the construct encodes a modified FIX polypeptide that includes an amino acid replacement T343R, T343E, or T343D, or the same replacement at a corresponding amino acid residue in an unmodified FIX polypeptide; an amino acid replacement at amino acid residue R318 or at a residue corresponding to 318, wherein the amino acid replacement is selected from among Y, E, F, and W; and/or an amino acid replacement R338E or R338D; where the unmodified FIX polypeptide comprises the sequence of amino acids set forth in SEQ ID NO: 2, 3, 20, or 325; and residue positions are referenced by mature numbering, and identified by alignment with SEQ ID NO:3. For example, the modified FIX polypeptide comprises replacements corresponding to R338E/T343R; and the unmodified FIX polypeptide comprises the sequence of amino acids set forth in SEQ ID NO: 2, 3, 20, or 325. The modified FIX polypeptide can further include a replacement corresponding to R318Y, whereby the resulting encoded modified FIX polypeptide comprises replacements corresponding to R318Y/R338E/T343R. Exemplary of an encoded mature modified FIX polypeptide is one that comprises the sequence of amino acids set forth in SEQ ID NO:394, or SEQ ID NO:394 in which residue 148 is A (alanine), or a sequence having at least 95% sequence identity therewith, which contains the replacements corresponding to R318Y/R338E/T343R. Other exemplary encoded modified FIX polypeptides include those that comprise replacements corresponding to replacements R318Y/R338E, or R318Y/T343R, or R318Y/E410N, or R338L, where the unmodified FIX polypeptide comprises the sequence of amino acids set forth in SEQ ID NO: 2, 3, 20, or 325. Modified FIX polypeptides can include those that comprise an amino acid replacement R318Y, and an amino acid replacement at an amino acid residue selected from among residues 338, 343, 403, and 410 of a mature FIX polypeptide having a sequence set forth in SEQ ID NO:3, or at amino acid residues corresponding to residues 338, 343, 403, or 410 in an unmodified FIX polypeptide, such as a modified FIX polypeptide comprising an amino acid replacement selected from among R338E, T343R, R403E, and E410N in a mature FIX polypeptide having a sequence set forth in SEQ ID NO:3, or the same replacements at corresponding amino acid residues in an unmodified FIX polypeptide. Exemplary modified FIX polypetides with replacements, in unmodified FIX polypeptides comprising the sequence of amino acids set forth in SEQ ID NO: 2, 3, 20, or 325, or other allelic variants, include modified FIX polypeptides with amino acid replacements selected from among replacements: R318Y/R338E/R403E/E410N, R318Y/R338E/T343R/R403E/E410N, R318Y/R338E/T343R/E410N, Y155F/R318Y/R338E/T343R/R403E, Y155F/K228N/K247N/N249S/R318Y/R338E/T343R/R403E/E410N, Y155F/K247N/N249S/R318Y/R338E/T343R/R403E, R318Y/R338E/T412A, K247N/N249S/R318Y/R338E/T343R/R403E, R318Y/R338E/T343R, Y155F/K247N/N249S/R318Y/R338E/T343R, K228N/R318Y/R338E/T343R/R403E/E410N, K228N/K247N/N249S/R318Y/R338E/T343R/R403E, R318Y/R338E/T343R/R403E/E410S, Y155F/K247N/N249S/R318Y/R338E, K247N/N249S/R318Y/R338E/T343R, R318Y/T343R/E410N, Y155F/R318Y/R338E/R403E, R318Y/R338E/R403E, R318Y/R338E/E410N, K228N/R318Y/E410N, R318Y/R403E/E410N, D203N/F205T/R318Y/E410N, A103N/N105S/R318Y/R338E/R403E/E410N, D104N/K106S/R318Y/R338E/R403E/E410N, K228N/R318Y/R338E/R403E/E410N, I125S/R318Y/R338E/R403E/E410N, D104N/K106S/I251S/R318Y/R338E/R403E/E410N, D104N/K106S/R318Y/R338E/E410N, I251S/R318Y/E410N/R338E, D104N/K106S/I251S/R318Y/R338E/E410N, A103N/N105S/K247N/N249S/R318Y/R338E/R403E/E410N, D104N/K106S/K247N/N249S/R318Y/R338E/R403E/E410N, K228N/K247N/N249S/R318Y/R338E/R403E/E410N, A103N/N105S/Y155F/R318Y/R338E/R403E/E410N, D104N/K106S/Y155F/R318Y/R338E/R403E/E410N, Y155F/K228N/R318Y/R338E/R403E/E410N, Y155F/I251S/R318Y/R338E/R403E/E410N, K247N/N249S/R318Y/R338E/R403E/E410N, Y155F/R318Y/R338E/R403E/E410N, K247N/N249S/R318Y/R338E/E410N, Y155F/R318Y/R338E/E410N, Y155F/K247N/N249S/R318Y/R338E/E410N, R318Y/R338E/R403E/E410S, R318Y/R338E/R403E/E410N/T412V, R318Y/R338E/R403E/E410N/T412A, R318Y/R338E/R403E/T412A, R318Y/R338E/E410S, R318Y/R338E/T412A, R318Y/R338E/E410N/T412V, D85N/K228N/R318Y/R338E/R403E/E410N, N260S/R318Y/R338E/R403E/E410N, R318Y/R338E/N346D/R403E/E410N, Y155F/R318Y/R338E/N346D/R403E/E410N, K247N/N249S/N260S/R318Y/R338E/R403E/E410N, D104N/K106S/N260S/R318Y/R338E/R403E/E410N, Y155F/N260S/R318Y/R338E/R403E/E410N, Y155F/R318Y/R338E/T343R/R403E/E410N, D104N/K106S/Y155F/K247N/N249S/R318Y/R338E/R403E/E410N, D104N/K106S/K228N/K247N/N249S/R318Y/R338E/R403E/E410N, Y155F/K228N/K247N/N249S/R318Y/R338E/R403E/E410N, Y155F/K247N/N249S/N260S/R318Y/R338E/R403E/E410N, D104N/K106S/R318Y/R338E/T343R/R403E/E410N, R318Y/R338E/N346Y/R403E/E410N, R318Y/R338E/T343R/N346Y/R403E/E410N, R318Y/R338E/T343R/N346D/R403E/E410N, R318Y/R338E/Y345A/R403E/E410N, K228N/I251S/R318Y/R338E/R403E/E410N, R318Y/R338E/Y345A/N346D/R403E/E410N, Y155F/K247N/N249S/R318Y/R338E/R403E, K247N/N249S/R318Y/R338E/R403E, Y155F/K247N/N249S/R318Y/R403E/E410N, K247N/N249S/R318Y/R403E/E410N, R318Y/R338E/T343R/R403E, Y155F/R318Y/R338E/T343R/E410N, R318Y/T343R/R403E/E410N, Y155F/R318Y/T343R/R403E/E410N, Y155F/K247N/N249S/R318Y/R338E/T343R/R403E/E410N, K247N/N249S/R318Y/R338E/T343R/R403E/E410N, Y155F/K228N/I251S/R318Y/R338E/R403E/E410N, N260S/R318Y/R338E/T343R/R403E/E410N, Y155F/N260S/R318Y/R338E/T343R/R403E/E410N, K228N/K247N/N249S/R318Y/R338E/T343R/R403E/E410N, Y155F/K247N/N249S/R318Y/R403E, Y155F/K247N/N249S/R318Y/E410N, K247N/N249S/R318Y/R338E/T343R/E410N, Y155F/K247N/N249S/R318Y/R338E/T343R/E410N, Y155F/K247N/N249S/R318Y/T343R/R403E/E410N, K247N/N249S/R318Y/T343R/R403E/E410N, Y155F/K247N/N249S/R318Y/T343R/R403E, K247N/N249S/R318Y/T343R/R403E, Y155F/K247N/N249S/R318Y/T343R/E410N, K247N/N249S/R318Y/T343R/E410N, Y155F/R318Y/R338E/T343R, Y155F/R318Y/T343R/R403E, Y155F/R318Y/T343R/E410N, K228N/K247N/N249S/R318Y/R338E/T343R/E410N, Y155F/K247N/N249S/R318Y/T343R, Y155F/K247N/N249S/R318Y/R338E/R403E/E410N, K228N/K247N/N249S/R318Y/T343R/R403E/E410N, and Y155F/R318Y/R403E/E410N, where numbering is with respect to the mature FIX polypeptide of SEQ ID NO:3. Other such exemplary modified FIX polypeptides include those that comprise amino acid replacements selected from among: R318Y/R338E/R403E/E410N, R318Y/R338E/T343R/R403E/E410N, R318Y/R338E/T343R/E410N, Y155F/R318Y/R338E/T343R/R403E, Y155F/K228N/K247N/N249S/R318Y/R338E/T343R/R403E/E410N, Y155F/K247N/N249S/R318Y/R338E/T343R/R403E, K247N/N249S/R318Y/R338E/T343R/R403E, R318Y/R338E/T343R, Y155F/K247N/N249S/R318Y/R338E/T343R, K228N/R318Y/R338E/T343R/R403E/E410N, K228N/K247N/N249S/R318Y/R338E/T343R/R403E, R318Y/R338E/T343R/R403E/E410S, Y155F/K247N/N249S/R318Y/R338E, K247N/N249S/R318Y/R338E/T343R, R318Y/T343R/E410N, and Y155F/R318Y/R338E/R403E; where numbering is with respect to the mature FIX polypeptide of SEQ ID NO:3; and the unmodified FIX polypeptide comprises the sequence of amino acids set forth in SEQ ID NO: 2, 3, 20, or 325. Particular embodiments include those in which the modified FIX polypeptide comprises the amino acid replacements R318Y/R338E/R403E/E410N, R318Y/R338E/T343R/R403E/E410N, or R318Y/R338E/T343R/E410N.

[0020] Nucleic acid encoding the modified FIX polypeptides include those in which the mature portion of FIX, corresponding to residues 1-415 of SEQ ID NO:3, is encoded by the sequence of nucleotides set forth in any of SEQ ID NOs:483-487, such as the sequence of nucleotides set forth in SEQ ID NO: 483 or 486. The portion encoding the modified FIX polypeptide and the intron inserted in the nucleic acid encoding FIX, such as between residues 428 and 429, comprises the sequence of nucleotides set forth in any of SEQ ID NOs:462-467. The codons can be optimized for expression in a human cell. It is found herein that codons optimized for expression in mice are very similar, such as at least about 90% similar, to human optimized sequences. Codon optimized sequences include those set forth in SEQ ID NOs:518-521, where SEQ ID NOs:518-521 are as follows:

| | Encoded Residues | |
|---|---|---|
| SEQ ID | of Mature Fix | |
| NO. | (SEQ ID NO: 2) | Description |
| 518 | encodes 47-461 | hWT-FIX mature codon optimized for human |
| | | 0.5 optimization; |
| 519 | encodes 47-461 | hWT-FIX-mature codon optimized for |
| | | human 0.8 optimization; |
| 520 | encodes 47-461 | hWT-FIX-mature codon optimized for |
| | | human 1.0 optimization. |

[0021] Provided are nucleic acid constructs in which the nucleic acid encoding the mature modified FIX polypeptides, corresponding to residues 47-461 of SEQ ID NO: 2, and residues 1-415 of SEQ ID NO: 3, has the sequence of nucleotides set forth in any of SEQ ID NOs:521-526, wherein SEQ ID NOs:521-526 are as follows:

| | Encoded Residues | |
|---|---|---|
| SEQ ID | of Mature Fix | |
| NO. | (SEQ ID NO: 2) | Description |
| 521 | encodes 47-461 | human FIX R318Y/R338E/T343R -FIX |
| | | mature codon optimized for human 0.5 |
| | | optimization; |
| 522 | encodes 47-461 | human FIX R318Y/R338E/T343R -FIX |
| | | mature codon optimized for human 0.8 |
| | | optimization; |
| 523 | encodes 47-461 | human FIX R318Y/R338E/T343R -FIX |
| | | mature codon optimized for human 1.0 |
| | | optimization; |
| 524 | encodes 47-461 | human FIX R338L-FIX mature codon |
| | | optimized for human 0.5 optimization; |
| 525 | encodes 47-461 | human FIX R338L-FIX mature codon |
| | | optimized for human 0.8 optimization; and |
| 526 | encodes 47-461 | human FIX R338L-FIX mature codon |
| | | optimized for human 1.0 optimization. |

[0022] Other optimized nucleic acid sequences include those encoding residues 30-461 of SEQ ID NO:2, having the sequence of nucleotides set forth in any of SEQ ID NOs:527-529, where SEQ ID NOs:527-529 are as follows:

| | Encoded Residues | |
|---|---|---|
| SEQ ID | of Mature Fix | |
| NO. | (SEQ ID NO: 2) | Description |
| 527 | encodes 30-461 | hWT-FIX codon optimized for human 0.5 |
| | | optimization; |
| 528 | encodes 30-461 | hWT-FIX codon optimized for human 0.8 |
| | | optimization; and |
| 529 | encodes 30-461 | hWT-FIX codon optimized for human 1.0 |
| | | optimization. |

[0023] Others are nucleic acid encoding the modified FIX polypeptide, corresponding to residues 30-461 of SEQ ID NO:2, that comprise the sequence of nucleotides set forth in any of SEQ ID NOs:530-535, where SEQ ID NOs:530-535 are as follows:

| | Encoded Residues | |
|---|---|---|
| SEQ ID | of Mature Fix | |
| NO. | (SEQ ID NO: 2) | Description |
| 530 | encodes 30-461 | human FIX R318Y/R338E/T343R -FIX codon |
| | | optimized for human 0.5 optimization; |
| 531 | encodes 30-461 | human FIX R318Y/R338E/T343R -FIX codon |
| | | optimized for human 0.8 optimization; |
| 532 | encodes 30-461 | human FIX R318Y/R338E/T343R -FIX codon |
| | | optimized for human 1.0 optimization; |
| 533 | encodes 30-461 | human FIX R338L-FIX codon optimized for |
| | | human 0.5 optimization; |
| 534 | encodes 30-461 | human FIX R338L-FIX codon optimized for |
| | | human 0.8 optimization; and |
| 535 | encodes 30-461 | human FIX R338L-FIX codon optimized for |
| | | human 1.0 optimization. |

[0024] Other exemplary nucleic acid constructs with optimized codons include those that include the signal sequence, the partial intron, and wild-type or modified human FIX, and comprise the sequence of nucleotides set forth in any of SEQ ID NOs: 536-553, where SEQ ID NOs: 536-553 are as follows:

| SEQ ID | Sequence | |
|---|---|---|
| NO. | Includes | Description |
| 536 | precursor + intron | hFIXss-Pro-mini Intron-Pro-human wild type |
| | | FIX optimized 0.5; |
| 537 | precursor + intron | hFIXss-Pro-mini Intron-Pro-human wild type |
| | | FIX optimized 0.8; |
| 538 | precursor + intron | hFIXss-Pro-mini Intron-Pro-human wild type |
| | | FIX optimized 1.0; |
| 539 | precursor + intron | hFIXss-Pro-mini Intron-Pro-human FIX |
| | | R318Y/R338E/T343R optimized 0.5; |
| 540 | precursor + intron | hFIXss-Pro-mini Intron-Pro-human FIX |
| | | R318Y/R338E/T343R optimized 0.8; |
| 541 | precursor + intron | hFIXss-Pro-mini Intron-Pro-human FIX |
| | | R318Y/R338E/T343R optimized 1.0; |
| 542 | precursor + intron | hFIXss-Pro-mini Intron-Pro-human FIX |
| | | R338L optimized 0.5; |
| 543 | precursor + intron | hFIXss-Pro-mini Intron-Pro-human FIX |
| | | R338L optimized 0.8; |
| 544 | precursor + intron | hFIXss-Pro-mini Intron-Pro-human FIX |
| | | R338L optimized 1.0; |
| 545 | precursor + intron | mouse optimized hFIXss-Pro-mini Intron-Pro- |
| | | human wild type FIX optimized 0.5; |
| 546 | precursor + intron | mouse optimized hFIXss-Pro-mini Intron-Pro- |
| | | human wild type FIX optimized 0.8; |
| 547 | precursor + intron | mouse optimized hFIXss-Pro-mini Intron-Pro- |
| | | human wild type FIX optimized 1.0; |
| 548 | precursor + intron | mouse optimized hFIXss-Pro-mini Intron-Pro- |
| | | human FIX R318Y/R338E/T343R optimized 0.5; |
| 549 | precursor + intron | mouse optimized hFIXss-Pro-mini Intron-Pro- |
| | | human FIX R318Y/R338E/T343R optimized 0.8; |
| 550 | precursor + intron | mouse optimized hFIXss-Pro-mini Intron-Pro- |
| | | human FIX R318Y/R338E/T343R optimized 1.0; |
| 551 | precursor + intron | mouse optimized hFIXss-Pro-mini Intron-Pro- |
| | | human FIX R338L optimized 0.5; |
| 552 | precursor + intron | mouse optimized hFIXss-Pro-mini Intron-Pro- |
| | | human FIX R338L optimized 0.8; and |
| 553 | precursor + intron | mouse optimized hFIXss-Pro-mini Intron-Pro- |
| | | human FIX R338L optimized 1.0. |

[0025] The sequences can be optimized, and regulatory regions can be selected for expression in a hepatocyte (in the liver).

[0026] Exemplary of constructs provided is one in which the portion encoding the modified FIX polypeptide and the intron comprises the sequence of nucleotides set forth in SEQ ID NO:466. Others include a construct comprising 2 ITRs (inverted terminal repeats) flanking the nucleic acid comprising nucleic acid encoding the FIX polypeptide with the intron, wherein the ITR is an AAV ITR, or a chimeric or hybrid AAV ITR. The AAV can be from any serotype, such as serotypes 1-11, and hybrids and chimeras thereof. Exemplary of an ITR is an AAV2 ITR. Exemplary ITR sequences include those that comprises the sequence of nucleotides set forth in SEQ ID NO: 435 or 437, or the ITRs set forth as residues 1-119 and 4281-4410 of SEQ ID NO:456, or an ITR of any of SEQ ID NOs: 436 and 501-511.

[0027] The constructs include transcription regulatory sequences operatively linked to the nucleic acid for transcription of the nucleic acid encoding the modified FIX polypeptide. In particular, they include liver-specific regulatory sequences, such as a promoter operatively linked for expression of the nucleic acid encoding the modified FIX polypeptide. In general, the selected promoter is a liver-specific or hepatocyte-specific promoter, such as, but not limited to, the human alpha-1 antitrypsin promoter (hAAT) (also called serpin A1 anti-trypsin promoter), or the hybrid liver-specific promoter (HLP), or a transthyretin (TTR) promoter. Exemplary promoter sequences are set forth in SEQ ID NOs:440 and 441.

[0028] The constructs also can include a transcription factor, particularly a transcription factor that is liver-specific, such as an enhancer. Exemplary enhancers are an ApoE/C1 gene locus enhancer, or the serpin A1 liver enhancer; exemplary sequences are set forth in SEQ ID NO:438 or SEQ ID NO:439, respectively. The constructs include transcription terminators, such as polyA sequences, for transcription termination, and others, such as the bGHpolyA terminator whose sequence is set forth in SEQ ID NO:443. In some examples, the polyA sequence is included for enhanced expression of the modified FIX polypeptide.

[0029] Exemplary constructs include those comprising the sequence of nucleotides set forth in any of SEQ ID NOs:456-461, such as the construct comprising the sequence of nucleotides set forth in SEQ ID NO:460. Also provided are vectors for producing the constructs. These include any of the vectors of any of SEQ ID NOs:447-455.

[0030] Provided are AAV vectors (also referred to as AAV virions) that comprise a capsid, and any of the constructs encoding a modified FIX polypeptide encapsulated therein. The AAV vector is one that transduces human hepatocytes with greater transduction efficiency, or with a reduced amount of AAV vector introduced, compared to the AAV capsid designated DJ/8, or can be one that transduces human and mouse hepatocytes with at least or substantially the same efficiency, or to the same extent, as the AAV capsid designated DJ/8. The vector can be one where the capsid is a chimeric capsid, such as a chimeric capsid comprising wild-type AAV serotypes. The chimeric capsid can comprise a mixture of sequences from two or more AAV serotypes, for example, two or more of AAV1, AAV6, AAV3B, and AAV8. The AAV vector can be one that also transduces islet cells. Exemplary of AAV vectors are those in which the capsid comprises the sequence of amino acids set forth in any of SEQ ID NOs: 418-420, and 492-500, or a sequence having at least 95% sequence identity therewith. These include AAV vectors with a capsid designated KP-1, KP-2 or KP-3, such as the capsid designated KP-1, whose sequence of amino acids is set forth in SEQ ID NO:418. Others include those encoded by the sequence of nucleotides set forth in any of SEQ ID NOs: 421-423, or a sequence having at least 95% sequence identity therewith. The encoded modified FIX polypeptide includes any described herein, or known to those of skill in the art, to have enhanced potency. These include the modified FIX polypeptide comprising the sequence of amino acids set forth in SEQ ID NO:394, or SEQ ID NO:394 in which residue 148 is A (alanine; SEQ ID NO:486). The construct in the vector can be one that has the sequence set forth in SEQ ID NO:460, or in SEQ ID NO:461.

[0031] Also provided are capsids, such as the capsid set forth in SEQ ID NO:561, for encapsulating a modified FIX polypeptide provided herein, where the provided AAV vectors comprise a capsid and any of the constructs encoding a modified FIX polypeptide encapsulated therein. Also provided are pharmaceutical compositions that contain the AAV vector comprising the capsid of SEQ ID NO:561. Also provided are methods of treating hemophilia, wherein the pharmaceutical composition containing the AAV vector comprising the capsid of SEQ ID NO:561 is administered to a subject with hemophilia.

[0032] Also provided are pharmaceutical compositions that contain any of the AAV vectors provided and described herein in a pharmaceutically acceptable vehicle. The vectors include the AAV vector that encodes a modified FIX polypeptide comprising the sequence of amino acids set forth in SEQ ID NO:394, or in SEQ ID NO:394 in which residue 148 is A (alanine; SEQ ID NO:486).

[0033] The pharmaceutical compositions can be formulated for single dosage administration, where a single dosage is about 10⁸ to 10¹⁵ viral genomes (vg), or 10⁹ to 10¹³ genome copies (gc) per dose, assuming an average human has a mass of about 75 kg. Other single dosages include a single dosage of about or at 10¹⁰ to 10¹³ vg or gc, or 10⁸ to 10¹¹ vg or gc, or 10⁸ to 10¹² vg or gc, or 10⁹ to 10¹¹ vg or gc, or 10⁸ to 10¹¹ vg or gc, assuming an average human has a mass of about 75 kg. The pharmaceutical compositions also can be formulated for single dosage administration, where a single dosage is about 10⁸ to 10¹⁶ viral genomes (vg), or 10⁹ to 10¹⁴ genome copies (gc) per dose, assuming an average human has a mass of about 75 kg. The pharmaceutical compositions can be formulated for any desired route of administration, including, but not limited to, parenteral, systemic, intravenous, intramuscular, oral, rectal, subcutaneous, direct injection into the liver, and other such routes. Direct injection into the liver can be effected by compartmentalizing the liver (such as by clamping liver), so that it is isolated from systemic circulation during and following injection of the vector or virus into the parenchyma of the liver (see, e.g., U.S. Pat. No. 9,821,114). Compartmentalization is maintained for at least 15, at least 20, at least 25, or at least 30 minutes, up to an hour, following injection into the liver. As a result, the vector or virus is quantitatively taken up by the liver parenchyma, so that there is little or no systemic exposure to the vector or virus. This eliminates adverse effects, such as viremia and immune reactions, and permits lower doses to be administered.

[0034] Provided are methods of treating hemophilia or uses of the provided vectors and pharmaceutical compositions for treatment of hemophilia. Treatment is effected by administering the AAV vectors or the pharmaceutical compositions provided herein to a subject who has hemophilia. Hemophilias include hemophilia B, and hemophilia B with inhibitors. The treatment should be one that results in at least 20%, at least 30%, at least 40%, or at least 50% normal clotting activity, so that the subject has mild hemophilia, or normal clotting, or reduced annualized bleeds. The subject is one who has a hemophilia, particularly hemophilia B. Exemplary of the encoded modified FIX polypeptide is the modified FIX polypeptide that comprises the sequence of amino acids set forth in SEQ ID NO:394, or in SEQ ID NO:394 in which residue 148 is A (alanine; SEQ ID NO:486). Administration can be effected by any suitable route, including parenterally, systemically, intra-muscularly, rectally, orally, or by direct injection into the liver. Exemplary of the modified FIX polypeptide is the modified FIX polypeptide that comprises the sequence of amino acids set forth in SEQ ID NO:394, or in SEQ ID NO:394 in which residue 148 is A (alanine; SEQ ID NO:486).

[0035] For the uses and methods, the amount of vector is any that is therapeutically effective, which can be determined by the skilled artisan, and depends upon the subject, the severity of disease, and other such parameters. Exemplary dosages are 10⁶ to 10¹³ vg/kg or gc/kg, such as 10⁸ to 10¹¹ vg/kg of the subject or gc/kg of the subject. The vector or pharmaceutical composition is administered intravenously. An exemplary dosage is 10⁶ to 10¹⁰ vg/kg or gc/kg of the subject. Lower dosages can be administered when the vector or pharmaceutical composition is administered via direct injection into the liver.

[0036] Methods for producing the AAV vector encoding the modified FIX polypeptide include packaging any of the constructs into a capsid that has the desired properties, including the transduction of the liver. Such capsids include those comprising the sequence of amino acids set forth in any of SEQ ID NOs: 418-420 and 492-500. The encoded modified FIX polypeptide is any that has the requisite activity/potency. Exemplary of the encoded modified FIX polypeptide is the modified FIX polypeptide that comprises the sequence of amino acids set forth in SEQ ID NO:394, or in SEQ ID NO:394 in which residue 148 is A (alanine; SEQ ID NO:486).

[0037] Modified FIX polypeptides for use in the AAV vector as described herein are exemplary of FIX polypeptides for use for gene therapy using the vectors and methods described herein. Encoding nucleic acids are encapsulated in the capsids described herein, such as the capsids with the sequences set forth in SEQ ID NOs: 418-420. The modified FIX polypeptides have improved procoagulant therapeutic properties compared to unmodified FIX polypeptide (recombinant FIX, such as BeneFIX® FIX, see, SEQ ID NOs: 20 and 325, and also, compared to the modified extended half-life forms). For example, among the modified FIX polypeptides for use in the vectors and methods herein are modified FIX polypeptides that exhibit increased coagulant activity, increased catalytic activity, increased resistance to AT-III, increased resistance to heparin and/or the AT-III/heparin complex, and/or improved pharmacokinetic properties, such as i) decreased clearance, ii) altered (e.g., increased or decreased) volume of distribution, iii) enhanced in vivo recovery, iv) enhanced total protein exposure in vivo (i.e., AUC), v) increased serum half-life (α-, β-, and/or γ-phase), and/or vi) increased mean resonance time (MRT). The higher potency and bioavailability and longer half-life and other properties permit a sufficiently low dose that is suitable for gene therapy, so that with the longer half-life, a steady state level of FIX is achieved.

[0038] Exemplary of modified FIX polypeptides for encoding in the AAV vectors as described herein are the modified FIX polypeptides that comprises replacements corresponding to R338E/T343R, where the unmodified FIX polypeptide comprises the sequence of amino acids set forth in SEQ ID NO: 3 or 20. The modified FIX polypeptide can include the replacement corresponding to R318Y alone, or in combination with replacements corresponding to R338E/T343R.

[0039] The modified FIX polypeptides encoded in the rAAV vectors provided herein can have an amino acid replacement at residue R318 or at a residue corresponding to 318, wherein the amino acid replacement is selected from among Y, E, F, and W; and/or an amino acid replacement T343R, T343E, or T343D, or the same replacement at a corresponding amino acid residue in an unmodified FIX polypeptide; and/or an amino acid replacement at amino acid position Y155, or at a residue corresponding to 155, that is selected from F or L.

[0040] The modified FIX polypeptide can comprise an amino acid replacement at residue R338 or at a residue corresponding to R338 in an unmodified FIX polypeptide; an amino acid replacement at residue T343 or at an amino acid residue corresponding to amino acid residue T343 in an unmodified FIX polypeptide; and/or an amino acid replacement at residue E410 or at an amino acid residue corresponding to amino acid residue E410 in an unmodified FIX polypeptide; and/or an amino acid replacement at an amino acid residue selected from among D203, F205, and K228, or at an amino acid residue corresponding to amino acid residue D203, F205, or K228 in an unmodified FIX polypeptide. The replacement at residue R339 can be D, E, or L. Combinations include R318Y/R338E, or the same replacements at corresponding amino acid residues in an unmodified FIX polypeptide. The modified FIX polypeptide can comprise an amino acid replacement T343R or T343K, which can be combined with a replacement at residue R318, such as the replacements R318Y/T343R or the same replacements at corresponding amino acid residues in an unmodified FIX polypeptide. The modified FIX polypeptide can further include an amino acid replacement at residue E410, or at an amino acid residue corresponding to 410 in an unmodified FIX polypeptide, that is N or S. The modified FIX polypeptide can comprise amino acid replacements R318Y/E410N, or the same replacements at corresponding amino acid residues in an unmodified FIX polypeptide. The modified FIX polypeptide can comprise an amino acid replacement R318Y and an amino acid replacement at an amino acid residue selected from among residues 338, 343, 403, and 410 of a mature FIX polypeptide having a sequence set forth in SEQ ID NO:3, or at amino acid residues corresponding to residues 338, 343, 403, or 410 in an unmodified FIX polypeptide. These include modified FIX polypeptides comprising an amino acid replacement selected from among R338E or R338L, T343R, R403E and E410N, in a mature FIX polypeptide having a sequence set forth in SEQ ID NO:3 or the same replacements at corresponding amino acid residues in an unmodified FIX polypeptide. Exemplary modified FIX polypeptides comprise the replacements T343R/Y345T, T343R/N346D, T343R/N346Y, R338E/T343R, R338E/T343R/R403E/E410N, R338E/T343R/R403E, R338E/T343R/R403E/E410S, N260S/R338E/T343R/R403E, R338E/T343R/R403E/E410N, R338E/T343R/E410N, R338E/R403E/E410N, Y155F/R338E/T343R/R403E/E410N, Y155F/R338E/T343R/R403E, Y155F/R338E/T343R/R403E/E410S, Y155F/N260S/R338E/T343R/R403E, Y155F/T343R/R403E/E410N, Y155F/R338E/T343R/E410N, and Y155F/R338E/R403E/E410N. The modified FIX polypeptide additionally can include a replacement at the residue corresponding to R318.

[0041] Provided herein are methods and regimens for the prophylactic treatment of hemophilia B by administering subcutaneously modified FIX polypeptides containing an amino acid replacement in an unmodified FIX polypeptide, where the amino acid replacement can be one or more of replacement of tyrosine (Y) at amino acid residue R318 (R318Y), R318E, R318F, R318W, R318D, R3181, R318K, R318L, R318M, R318S, R318V, S61A, S61C, S61D, S61E, S61F, S61G, S61I, S61K, S61L, S61P, S61R, S61V, S61W, S61Y, D64A, D64C, D64F, D64H, D641, D64L, D64M, D64P, D64R, D64S, D64T, D64W, Y155F, Y155L, N157D, N157E, N157F, N157I, N157K, N157L, N157M, N157R, N157V, N157W, N157Y, S158A, S158D, S158E, S158F, S158G, S158I, S158K, S158L, S158M, S158R, S158V, S158W, S158Y, N167D, N167Q, N167E, N167F, N167G, N167H, N167I, N167K, N167L, N167M, N167P, N167R, N167V, N167W, N167Y, T169A, T169D, T169E, T169F, T169G, T169I, T169K, T169L, T169M, T169P, T169R, T169S, T169V, T169W, T169Y, T172A, T172D, T172E, T172F, T172G, T172I, T172K, T172L, T172M, T172P, T172R, T172S, T172V, T172W, T172Y, D203M, D203Y, D203F, D203H, D203I, D203K, D203L, D203R, D203V, D203W, A204M, A204Y, A204F, A204I, A204W, E239S, E239R, E239K, E239D, E239F, E2391, E239L, E239M, E239T, E239V, E239W, E239Y, H257F, H257E, H257D, H2571, H257K, H257L, H257M, H257Q, H257R, H257V, H257W, R312Y, R312L, R312C, R312D, R312E, R312F, R312I, R312K, R312M, R312P, R312S, R312T, R312V, R312W, K316M, K316D, K316F, K316H, K316I, K316L, K316R, K316V, K316W, K316Y, F342I, F342D, F342E, F342K, F342L, F342M, F342S, F342T, F342V, F342W, F342Y, T343R, T343E, T343D, T343F, T343I, T343K, T343L, T343M, T343S, T343V, T343W, T343Y, N346Y, N346E, N346F, N346H, N346I, N346K, N346L, N346M, N346Q, N346R, N346V, N346W, K400E, K400C, K400D, K400F, K400G, K400L, K400M, K400P, K400S, K400T, K400V, K400Y, R403D, R403F, R4031, R403K, R403L, R403M, R403S, R403V, R403Y, E410D, E410S, E410A, E410F, E410G, E410I, E410K, E410L, E410M, E410P, E410R, E410T, E410V, E410W, E410Y, T412A, T412V, T412C, T412D, T412E, T412F, T412G, T412I, T412M, T412P, T412W, or T412Y, in a mature FIX polypeptide having a sequence set forth in SEQ ID NO:3, or the same replacement at a corresponding amino acid residue in an unmodified FIX polypeptide, wherein corresponding amino acid residues are identified by alignment of the unmodified FIX polypeptide with the polypeptide of SEQ ID NO:3; and provided that the modified FIX polypeptide does not contain the modifications F342I/T343R/Y345T. In particular, provided herein are prophylactic subcutaneous methods and regimens in which the modified FIX polypeptides contain the amino acid replacements R318Y/R338E/R403E/E410N, R318Y/R338E/T343R/R403E/E410N, R318Y/R338E/T343R/E410N, Y155F/R318Y/R338E/T343R/R403E, Y155F/K228N/K247N/N249S/R318Y/R338E/T343R/R403E/E410N, Y155F/K247N/N249S/R318Y/R338E/T343R/R403E, K247N/N249S/R318Y/R338E/T343R/R403E, R318Y/R338E/T343R, Y155F/K247N/N249S/R318Y/R338E/T343R, K228N/R318Y/R338E/T343R/R403E/E410N, K228N/K247N/N249S/R318Y/R338E/T343R/R403E, R318Y/R338E/T343R/R403E/E410S, Y155F/K247N/N249S/R318Y/R338E, K247N/N249S/R318Y/R338E/T343R, R318Y/T343R/E410N, Y155F/R318Y/R338E/R403E, Y155F/R338E/T343R/R403E/E410N, Y155F/K247N/N249S/R338E/R403E/E410N, K247N/N249S/R338E/T343R/R403E/E410N, or R338E/T343R/E410N. In some embodiments, the FIX polypeptide comprises the replacement R338L in place of the replacement R338E, or contains the replacement R338L in addition to other replacements.

[0042] The modified FIX polypeptide for use in the prophylactic subcutaneous methods and regimens can contain two amino acid replacements in an unmodified FIX polypeptide, where: the first amino acid replacement is at an amino acid residue selected from among residues at positions 53, 61, 64, 85, 103, 104, 105, 106, 108, 155, 158, 159, 167, 169, 172, 179, 202, 203, 204, 205, 228, 239, 241, 243, 247, 249, 251, 257, 259, 260, 262, 265, 284, 293, 312, 314, 315, 316, 317, 318, 319, 321, 333, 338, 343, 345, 346, 392, 394, 400, 403, 410, 412, and 413, in a mature FIX polypeptide having a sequence set forth in SEQ ID NO:3; or a corresponding amino acid residue in an unmodified FIX polypeptide, wherein corresponding amino acid residues are identified by alignment of the unmodified FIX polypeptide with the FIX polypeptide of SEQ ID NO:3; and the second amino acid replacement is at an amino acid residue selected from among residues at positions 5, 53, 61, 64, 85, 155, 158, 159, 167, 239, 260, 284, 293, 312, 318, 333, 338, 346, 400, 403, 410, 412, and 413, in a mature FIX polypeptide having a sequence set forth in SEQ ID NO:3, or a corresponding amino acid residue in an unmodified FIX polypeptide, wherein corresponding amino acid residues are identified by alignment of the unmodified FIX polypeptide with the FIX polypeptide of SEQ ID NO:3.

[0043] The first amino acid replacement in the modified FIX polypeptide can be selected from among S53A, S61A, D64A, D64N, D85N, A103N, D104N, N105S, K106S, K106N, V108S, Y155F, Y155H, Y155Q, S158A, S158D, S158E, T159A, N167D, N167Q, T169A, T172A, T179A, V202M, V202Y, D203M, D203Y, A204M, A204Y, K228N, E239A, E239N, E239S, E239R, E239K, T241N, H243S, K247N, N249S, I251S, H257F, H257E, H257F, H257Y, H257S, Y259S, N260S, A262S, K265T, Y284N, K293E, K293A, R312Q, R312A, R312Y, R312L, F314N, H315S, K316S, K316N, K316A, K316E, K316S, K316M, G317N, R318A, R318E, R318Y, R318N, S319N, A320S, L321S, K321N, R333A, R333E, R333S, R338A, R338E, R338L, F342I, T343R, T343E, T343Q, Y345A, Y345T, N346D, N346Y, K392N, K394S, K400A, K400E, R403A, R403E, E410Q, E410N, E410D, E410S, E410A, T412A, T412V, and K413N, or a conservative amino acid replacement, or the same replacement at a corresponding amino acid residue in an unmodified FIX polypeptide; and the second amino acid replacement is selected from among K5A, S53A, S61A, D64A, D64N, D85N, Y155F, Y155H, Y155Q, S158A, S158D, S158E, T159A, N167D, N167Q, E239A, E239N, E239S, E239R, E239K, N260S, Y284N, K293E, K293A, R312Q, R312A, R312Y, R312L, R318A, R318E, R318Y, R318N, R333A, R333E, R333S, R338A, R338E, R338L, N346D, N346Y, K400A, K400E, R403A, R403E, E410Q, E410N, E410D, E410S, E410A, T412A, T412V, and K413N, or a conservative amino acid replacement, or the same replacement at a corresponding amino acid residue in an unmodified FIX polypeptide. For example, the first amino acid replacement is at a position selected from among 318, 155, 247, 249, 338, 403, and 410, or at a corresponding amino acid residue in an unmodified FIX polypeptide; and the second amino acid replacement is at a position selected from among 338, 155, 247, 249, 318, 403, and 410, or is at a corresponding amino acid residue in an unmodified FIX polypeptide. Exemplary of these are embodiments where the first amino acid replacement is selected from among R318Y, Y155F, K247N, N249S, R338E, R403E, and E410N, or is the same amino acid replacement at a corresponding amino acid residue in an unmodified FIX polypeptide; and the second amino acid replacement is selected from among R338E, Y155F, K247N, N249S, R318Y, R403E, and E410N, or is the same replacement at a corresponding amino acid residue in an unmodified FIX polypeptide. The polypeptides can include these replacements, and, additionally or alternatively, amino acid replacements selected from among amino acid replacements K400E/R403E, D85N/K228N, D85N/I251S, K400A/R403A, R338A/R403A, R338E/R403E, K293A/R403A, K293E/R403E, R318A/R403A, R338E/E410N, K228N/E410N, K228N/R338E, K228N/R338A, and R403E/E410N, or the same replacements at corresponding amino acid residues in an unmodified FIX polypeptide.

[0044] In some examples, the first or the second amino acid replacement is replacement with an amino acid residue selected from among alanine (Ala, A); arginine (Arg, R); asparagine (Asn, N); aspartic acid (Asp, D); cysteine (Cys, C); glutamic acid (Glu, E); glutamine (Gln, Q); glycine (Gly, G); histidine (His, H); isoleucine (Ile, I); leucine (Leu, L); lysine (Lys, K); methionine (Met, M); phenylalanine (Phe, F); proline (Pro, P); serine (Ser, S); threonine (Thr, T); tryptophan (Trp, W); tyrosine (Tyr, Y); and valine (Val, V), providing that the replacing amino acid is not the same as the amino acid it replaces. In particular examples, the first amino acid replacement is replacement with an amino acid residue selected from among alanine; asparagine; aspartic acid, glutamic acid; glutamine; histidine; isoleucine; leucine; lysine; methionine; phenylalanine; serine; threonine; tyrosine; and valine. For example, exemplary amino acid replacements include S53A, S61A, D64A, D64N, D85N, A103N, D104N, N105S, K106S, K106N, V108S, Y155F, Y155H, Y155Q, S158A, S158D, S158E, T159A, N167D, N167Q, T169A, T172A, T179A, V202M, V202Y, D203M, D203Y, A204M, A204Y, K228N, E239A, E239N, E239S, E239R, E239K, T241N, H243S, K247N, N249S, I251S, H257F, H257E, H257F, H257Y, H257S, Y259S, N260S, A262S, K265T, Y284N, K293E, K293A, R312Q, R312A, R312Y, R312L, F314N, H315S, K316S, K316N, K316A, K316E, K316S, K316M, G317N, R318A, R318E, R318Y, R318N, S319N, A320S, L321S, R333A, R333E, R333S, R338A, R338E, R338L, T343R, T343E, T343Q, F342I, Y345A, Y345T, N346D, N346Y, K392N, K394S, K400A, K400E, R403A, R403E, E410Q, E410N, E410D, E410S, E410A, T412A, T412V, or K413N. Other exemplary amino acid replacements are conservative amino acid replacements thereof.

[0045] In some instances, the second amino acid replacement is replacement with an amino acid residue selected from among alanine; arginine; asparagine; aspartic acid; glutamic acid; glutamine; histidine; leucine; lysine; phenylalanine; serine; threonine; tyrosine; or valine. For example, exemplary amino acid replacements include K5A, S53A, S61A, D64A, D64N, D85N, Y155F, Y155H, Y155Q, S158A, S158D, S158E, T159A, N167D, N167Q, E239A, E239N, E239S, E239R, E239K, N260S, Y284N, K293E, K293A, R312Q, R312A, R312Y, R312L, R318A, R318E, R318Y, R318N, R333A, R333E, R333S, R338A, R338E, R338L, N346D, N346Y, K400A, K400E, R403A, R403E, E410Q, E410N, E410D, E410S, E410A, T412A, T412V, or K413N. Other exemplary amino acid replacements are conservative amino acid replacements thereof.

[0046] In particular examples, the first amino acid replacement is at a position corresponding to a position selected from among 155, 247, 249, 318, 338, 403, and 410, such as, for example, Y155F, K247N, N249S, R318Y, R338E, R403E, and E410N. In further examples, the second amino acid replacement is at a position corresponding to a position selected from among 155, 247, 249, 318, 338, 403, and 410, such as, for example, Y155F, K247N, N249S, R318Y, R338E, R403E, and E410N.

[0047] Among the modified FIX polypeptides for use in the methods and regimens provided herein are those containing amino acid replacements selected from among amino acid replacements corresponding to K400E/R403E, R318E/R403E, R318Y/E410N, K228N/R318Y, Y155F/K228N, Y155F/I251S, Y155F/N346D, Y155F/N260S, R338E/T343R, E410N/T412A, E410N/T412V, R318Y/R338E, D85N/K228N, D85N/I251S, K400A/R403A, R338A/R403A, R338E/R403E, K293A/R403A, K293E/R403E, R318A/R403A, R338E/E410N, K228N/E410N, K228N/R338E, K228N/R338A, and R403E/E410N.

[0048] In some examples, the modified FIX polypeptides contain one or more further amino acid replacements, such as one or more replacements at a position selected from among 53, 61, 64, 85, 103, 104, 105, 106, 108, 155, 158, 159, 167, 169, 172, 179, 202, 203, 204, 205, 228, 239, 241, 243, 247, 249, 251, 257, 259, 260, 262, 265, 284, 293, 312, 314, 315, 316, 317, 318, 319, 321, 333, 338, 343, 346, 345, 392, 394, 400, 403, 410, 412, and 413, in a mature FIX polypeptide having a sequence set forth in SEQ ID NO:3. For example, the modified FIX polypeptides can contain a further amino acid replacement selected from among Y5A, S53A, S61A, D64A, D64N, D85N, A103N, D104N, N105S, K106S, K106N, V108S, Y155F, Y155H, Y155Q, S158A, S158D, S158E, T159A, N167D, N167Q, T169A, T172A, T179A, V202M, V202Y, D203M, D203Y, A204M, A204Y, K228N, E239A, E239N, E239S, E239R, E239K, T241N, H243S, K247N, N249S, I251S, H257F, H257E, H257F, H257Y, H257S, Y259S, N260S, A262S, K265T, Y284N, K293E, K293A, R312Q, R312A, R312Y, R312L, F314N, H315S, K316S, K316N, K316A, K316E, K316S, K316M, G317N, R318A, R318E, R318Y, R318N, S319N, A320S, L321S, R333A, R333E, R333S, R338A, R338E, R338L, T343R, T343E, T343Q, F342I, Y345A, Y345T, N346D, N346Y, K392N, K394S, K400A, K400E, R403A, R403E, E410Q, E410N, E410D, E410S, E410A, T412A, T412V, and K413N, or a conservative amino acid replacement thereof.

[0049] In some examples, the modified FIX polypeptides for use in the methods provided herein contain amino acid replacements selected from among amino acid replacements corresponding to R318Y/R338E/R403E, D203N/F205T/R318Y, R318Y/R338E/E410N, K228N/R318Y/E410N, R318Y/R403E/E410N, R318Y/R338E/T412A, R318Y/R338E/R403E/E410N, D203N/F205T/R318Y/E410N, A103N/N105S/R318Y/R338E/R403E/E410N, D104N/K106S/R318Y/R338E/R403E/E410N, K228N/R318Y/R338E/R403E/E410N, I125S/R318Y/R338E/R403E/E410N, D104N/K106S/I251S/R318Y/R338E/R403E/E410N, D104N/K106S/R318Y/E410N/R338E, I125S/R318Y/E410N/R338E, D104N/K106S/I251S/R318Y/E410N/R338E, A103N/N105S/Y155F, D104N/K106S/Y155F, Y155F/K247N/N249S, A103N/N105S/K247N/N249S/R318Y/R338E/R403E/E410N, D104N/K106S/K247N/N249S/R318Y/R338E/R403E/E410N, K228N/K247N/N249S/R318Y/R338E/R403E/E410N, A103N/N105S/Y155F/R318Y/R338E/R403E/E410N, D104N/K106S/Y155F/R318Y/R338E/R403E/E410N, Y155F/K228N/R318Y/R338E/R403E/E410N, Y155F/I251S/R318Y/R338E/R403E/E410N, Y155F/K247N/N249S/R318Y/R338E/R403E/E410N, K247N/N249S/R318Y/R338E/R403E/E410N, Y155F/R318Y/R338E/R403E/E410N, K247N/N249S/R318Y/R338E/E240N, Y155F/R318Y/R338E/E410N, Y155F/K247N/N249S/R318Y/R338E/E410N, D104N/K106S/Y155F/K228N/K247N/N249S, D104N/K106S/Y155F/K247N/N249S, D104N/K106S/Y155F/K228N, Y155F/K228N/K247N/N249S, R318Y/R338E/R403E/E410S, R318Y/R338E/R403E/E410N/T412V, R318Y/R338E/R403E/E410N/T412A, R318Y/R338E/R403E/T412A, R318Y/R338E/E410S, R318Y/R338E/T412A, R318Y/R338E/E410N/T412V, D85N/K228N/R318Y/R338E/R403E/E410N, N260S/R318Y/R338E/R403E/E410N, R318Y/R338E/N346D/R403E/E410N, Y155F/R318Y/R338E/N346D/R403E/E410N, Y155F/N260S/N346D, K247N/N249S/N260S/R318Y/R338E/R403E/E410N, D104N/K106S/N260S/R318Y/R338E/R403E/E410N, Y155F/N260S/R318Y/R338E/R403E/E410N, R318Y/R338E/T343R/R403E/E410N, D104N/K106S/Y155F/N260S, Y155F/K247N/N249S/N260S, D104N/K106S/Y155F/K247N/N249S/N260S, D104N/K106S/Y155F/K228N, D104N/K106S/Y155F/K247N/N249S, D85N/D203N/F205T, D85N/D104N/K106S/I251S, K293A/R338A/R403A, K293E/R338E/R403E, R338E/R403E/E410N, D203N/F205T/K228N, D203N/F205T/E410N, D203N/F205T/R338E, D203N/F205T/R338A, D203N/F205T/R338E/R403E, K228N/R338E/R403E, K247N/N249S/N260S, D104N/K106S/N260S, K228N/K247N/N249S/D104N/K106S, A103N/N105S/K228N, D104N/K106S/K228N, A103N/N105S/I251S, D104N/K106S/I251S, A103N/N105S/K247N/N249S, D104N/K106S/K247N/N249S, K228N/K247N/N249 S, D104N/K106S/K228N/K247N/N249S, K247N/N249S/N260S, D104N/K106S/N260S, Y259F/K265T/Y345T, and D104N/K106S/K247N/N249S/N260S.

[0050] Also provided for use in the methods herein are modified FIX polypeptides containing a modification in an unmodified FIX polypeptide, wherein the modification is selected from among modifications corresponding to amino acid replacements S61A, D64A, Y155F, N157D, S158A, S158D, S158E, N167D, N167Q, T169A, T172A, D203M, D203Y, A204M, A204Y, E239S, E239R, E239K, H257F, H257E, R312Y, R312L, K316M, R318E, R318Y, T343R, T343E, F342I, N346Y, K400E, E410D, E410S, E410A, T412A, and T412V, in a mature FIX polypeptide having a sequence set forth in SEQ ID NO:3. In some examples, the modified FIX polypeptide contains two or more of the amino acid replacements.

[0051] In particular instances, the modified FIX polypeptide contains the mutation Y155F. For example, provided are modified FIX polypeptides that contain the replacement Y155F, and a modification at an amino acid position selected from among positions corresponding to 247, 249, 338, 403, and 410, of a mature FIX polypeptide having a sequence set forth in SEQ ID NO:3. In one example, the modified FIX polypeptide contains the replacements Y155F/K247N/N249S. In further instances, the modified FIX polypeptide contains the mutation R318Y. For example, provided are modified FIX polypeptides containing the replacement R318Y and a modification at an amino acid position selected from positions corresponding to 338, 403, and 410 of a mature FIX polypeptide having a sequence set forth in SEQ ID NO:3, such as, for example, R338E, R403E, or E410N.

[0052] In some examples, the modified FIX polypeptides contain one or more further modifications at an amino acid position selected from among positions corresponding to 5, 53, 61, 64, 85, 103, 104, 105, 106, 108, 148, 155, 157, 158, 159, 167, 169, 172, 179, 202, 202, 203, 204, 205, 228, 239, 241, 243, 247, 249, 251, 257, 259, 260, 262, 265, 284, 293, 312, 314, 315, 316, 317, 318, 319, 320, 321, 333, 338, 343, 345, 346, 392, 394, 400, 403, 410, 412, and 413, of a mature FIX polypeptide having a sequence set forth in SEQ ID NO:3. Exemplary modification(s) are selected from among modifications corresponding to amino acid replacements K5A, S53A, S61A, D64A, D64N, D85N, A103N, D104N, N105S, N105T, K106N, K106N, K106T, V108S, V108T, T148A, Y155F, Y155H, N157D, N157Q, S158A, S158D, S158E, T159A, N167D, N167Q, T169A, T172A, T179A, V202M, V202Y, D203M, D203Y, D203N, A204M, A204Y, F205S, F205T, K228N, E239N, T241N, E239S, E239A, E239R, E239K, H243S, H243T, K247N, N249S, N249T, I251S, I251T, H257F, H257Y, H257E, H257S, N260S, A262S, A262T, Y284N, K293E, K293A, R312Q, R312A, R312Y, R312L, F314N, H315S, K316S, K316T, K316M, G317N, R318E, R318Y, R318N, R318A, S319N, A320S, L321N, L321S, L321T, R333A, R333E, R338A, R338E, T343R, T343E, T343Q, F342I, Y345A, Y345T, N346D, N346T, K392N, K394S, K394T, K400A, K400E, R403A, R403E, E410Q, E410S, E410N, E410A, E410D, T412V, T412A, and K413N.

[0053] Thus, provided herein are methods and regimens for subcutaneous prophylaxis of hemophilia B that include the administration of modified FIX polypeptides containing modifications selected from among modifications corresponding to amino acid replacements K400E/R403E, R318E/R403E, R318Y/E410N, R318Y/R338E/R403E, D203N/F205T/R318Y, K228N/R318Y, R318Y/R338E/E410N, K228N/R318Y/E410N, R318Y/R403E/E410N, R318Y/R338E/R403E/E410N, D203N/F205T/R318Y/E410N, A103N/N105S/R318Y/R338E/R403E/E410N, D104N/K106S/R318Y/R338E/R403E/E410N, K228N/R318Y/R338E/R403E/E410N, I251S/R318Y/R338E/R403E/E410N, D104N/K106S/I251S/R318Y/R338E/R403E/E410N, D104N/K106S/R318Y/E410N/R338E, I251S/R318Y/E410N/R338E, D104N/K106S/I251S/R318Y/E410N/R338E, A103N/N105S/Y155F, D104N/K106S/Y155F, Y155F/K228N, Y155F/I251S, Y155F/K247N/N249S, A103N/N105S/K247N/N249S/R318Y/R338E/R403E/E410N, D104N/K106S/K247N/N249S/R318Y/R338E/R403E/E410N, K228N/K247N/N249S/R318Y/R338E/R403E/E410N, A103N/N105S/Y155F/R318Y/R338E/R403E/E410N, D104N/K106S/Y155F/R318Y/R338E/R403E/E410N, Y155F/K228N/R318Y/R338E/R403E/E410N, Y155F/I251S/R318Y/R338E/R403E/E410N, Y155F/K247N/N249S/R318Y/R338E/R403E/E410N, K247N/N249S/R318Y/R338E/R403E/E410N, Y155F/R318Y/R338E/R403E/E410N, K247N/N249S/R318Y/R338E/E240N, Y155F/R318Y/R338E/E410N, Y155F/K247N/N249S/R318Y/R338E/E410N, D104N/K106S/Y155F/K228N/K247N/N249S, D104N/K106S/Y155F/K247N/N249S, D104N/K106S/Y155F/K228N, Y155F/K228N/K247N/N249S, R318Y/R338E/R403E/E410S, R318Y/R338E/R403E/E410N/T412V, R318Y/R338E/R403E/E410N/T412A, R318Y/R338E/R403E/T412A, R318Y/R338E/E410S, R318Y/R338E/T412A, R318Y/R338E/E410N/T412V, D85N/K228N/R318Y/R338E/R403E/E410N, N260S/R318Y/R338E/R403E/E410N, R318Y/R338E/N346D/R403E/E410N, Y155F/N346D, Y155F/R318Y/R338E/N346D/R403E/E410N, Y155F/N260S, Y155F/N260S/N346D, K247N/N249S/N260S/R318Y/R338E/R403E/E410N, D104N/K106S/N260S/R318Y/R338E/R403E/E410N, Y155F/N260S/R318Y/R338E/R403E/E410N, R318Y/R338E/T343R/R403E/E410N, D104N/K106S/Y155F/N260S, Y155F/K247N/N249S/N260S, R338E/T343R, D104N/K106S/Y155F/K247N/N249S/N260S, D104N/K106S/Y155F/K228N, D104N/K106S/Y155F/K247N/N249S, T343R/Y345T, E410N/T412A, R410N/T412V, and R318Y/R338E. In particular examples, the modified FIX polypeptides contain modifications corresponding to the amino acid replacements R318Y/R338E/R403E/E410N, or Y155F/K247N/N249S/R318Y/R338E/R403E/E410N.

[0054] In some instances, the unmodified FIX polypeptide contains a sequence of amino acids set forth in any of SEQ ID NOs: 2, 3, 20, or 325, or is a species variant thereof, or a variant having at least 60% sequence identity with the FIX polypeptide of any of SEQ ID NOs: 2, 3, 20, or 325, or is an active fragment of a FIX polypeptide that comprises a sequence of amino acids set forth in any SEQ ID NOs: 2, 3, 20, or 325. For example, the species variant can have the sequence of amino acids set forth in any of SEQ ID NOs: 4-18. In other examples, the variant having at least 60% sequence identity with the FIX polypeptide of any of SEQ ID NOs: 2, 3, 20, or 325, has a sequence of amino acids set forth in any of SEQ ID NOs: 75-272. In further examples, the modified FIX polypeptide is an active fragment of an unmodified FIX polypeptide; and the modified FIX polypeptide contains the modification(s) described herein.

[0055] Any of the modified FIX polypeptides for use in the methods and regimens provided herein can contain one or more modifications that introduces and/or eliminates one or more glycosylation sites compared to the unmodified FIX polypeptide. In some examples, the glycosylation sites are selected from among, N-, O-, and S-glycosylation sites. In one example, one or more N-glycosylation sites are introduced compared to the unmodified FIX polypeptide. In some examples, the N-glycosylation site is introduced at amino acid positions corresponding to positions selected from among Y1, S3, G4, K5, L6, E7, F9, V10, Q11, G12, L14, E15, R16, M19, E20, K22, S24, F25, E26, E27, A28, R29, E30, V31, F32, E33, T35, E36, R37, T39, E40, F41, W42, K43, Q44, Y45, V46, D47, G48, D49, Q50, E52, S53, N54, L57, N58, G59, S61, K63, D65, 166, N67, S68, Y69, E70, W72, P74, F77, G79, K80, N81, E83, L84, D85, V86, T87, N89, 190, K91, N92, R94, K100, N101, 5102, A103, D104, N105, K106, V108, 5110, E113, G114, R116, E119, N120, Q121, K122, S123, E125, P126, V128, P129, F130, R134, V135, S136, S138, Q139, T140, S141, K142, A146, E147, A148, V149, F150, P151, D152, V153, D154, Y155, V156, S158, T159, E160, A161, E162, T163, I164, L165, D166, I168, T169, Q170, S171, T172, Q173, S174, F175, N176, D177, F178, T179, R180, G183, E185, D186, K188, P189, K201, V202, D203, E213, E224, T225, G226, K228, E239, E240, T241, H243, K247, N249, I251, R252, I253, P255, H257, N258, N260, A261, A262, I263, N264, K265, A266, D276, E277, P278, V280, N282, S283, Y284, D292, K293, E294, N297, I298, K301, F302, G303, S304, Y306, R312, F314, H315, K316, G317, R318, S319, L321, V322, Y325, R327, P329, L330, D332, R333, A334, T335, L337, R338, K341, F342, T343, Y345, N346, H354, E355, G357, R358, Q362, E372, E374, G375, E388, M391, K392, G393, K394, R403, N406, K409, E410, K411, and K413, of the mature FIX polypeptide set forth in SEQ ID NO:3.

[0056] Exemplary modifications that introduce a glycosylation site include those selected from among modifications corresponding to amino acid replacements Y1N, Y1N+S3T, S3N+K5S/T, G4T, G4N+L6S/T, K5N+E7T, L6N+EBT, E7N+F9T, F9N+Q11S/T, V10N+G12S/T, Q11N+N13T, G12N+L14S/T, L14N+R16T, E15T, E15N+E17T; R16N+C18S/T, M19N+E21T; E20N+K22T, K22N, S24N+E26T; F25N+E27T; E26N+A28T; E27N+R29T; A28N+E30T; R29N+V31S/T, E30N+F32T; V31N+E33T; F32N+N34T, E33N, T35N+R37S/T, E36T; E36N; R37N, T39N+F41S/T, E40N+W42T, F41N+K43S/T, W42N+Q44S/T, K43N+Y45T; Q44N+V46S/T, Y45N+D47T, V46N+G48S/T, D47N+D49S/T, G48N+Q50S/T, D49N+C51S/T, Q50N+E52S/T, E52N+N54T, S53N+P55S/T, C56S/T, L57N+G59S/T, G59N+S61T; G60S/T, S61N+K63S/T, K63N+D65S/T, D65N+N67S/T, I66N+S68S/T, Y69S/T, Y69N+C71S/T, S68N+E70S/T, E70N+W72S/T, W72N+P74S/T, P74N+G76S/T, F75N, G76N+E78T, E78N+K80T, F77T, F77N+G79S/T, G79N+N81S/T, K80N+C82S/T, E83S/T, E83N+D85S/T, L84N+V86S/T, D85N, V86A, V86N+C88S/T, T87N+N89S/T, I90N+N92S/T, K91S/T, I90N+N92S/T, K91N+G93 S/T, R94S/T, R94N+E96S/T, K100N, A103S/T, S102N+D104S/T, A103N+N105S/T, D104N+K106S/T, V107S/T, K106N+V108S/T, V108N+V110S/T, S111N, E113N+Y115S/T, G114N+R116S/T, R116N+A118S/T, E119N+Q121S/T, K122S/T, Q121N+S123S/T, K122N+C124S/T S123N+E125S/T, E125N+A125S/T, P126N+V128S/T, A127N+P129T, V128N+F130S/T, P129N+P131S/T, F130N+C132S/T, R134N, V135N+V137S/T, S136N, S138N, V137N+Q139T; Q139N, T140N+L142S/T, S141N+L143S/T, K142N, A146N+A148S/T, E147N+V149S/T, T148N+F150S/T, V149N+P151S/T, F150N+D152S/T, P151N+V153S/T, D152N+D154S/T, V153N+Y155S/T, D154N+V156S/T, Y155N+N157S/T, V156N, S158N+E160S/T, T159N+A161S/T, E160N+E162S/T, A161N, E162N+I164S/T, T163N+L165S/T, I164N+D166S/T, L165N+N167S/T, D166N+I168S/T, I168N+Q170S/T, T169N, Q170N, S171N+Q173S/T, T172N, Q173N+F175S/T, S174N+N176S/T, F175N+D177S/T, F178S/T, D177N, D177E, F178N+R180S/T, T179N+V181S/T, R180N+V182S/T, G183+E185S/T, G184N+D186T, E185N+A187S/T, D186N+K188S/T, A187N+P189T, K188N+G190S/T, P189N+Q181S/T, G200N+V202T, K201N+D203S/T, K201T, V202N+A204S/T, D203N+F205S/T, E213N+W215S/T, K214T, V223T, E224N+G226S/T, T225N+V227S/T, G226N+K228S/T, V227N+I229T, K228N, H236N+I238T; I238N+E240T; E239N, E240N+E242S/T, E242N, T241N+H243S/T, H243N+E245S/T, K247N+N249S/T, V250N+R252T, I251S/T, I251N+I253S/T, R252N+I254S/T, I253N+P255S/T, P255N+H257S/T, H257N+Y259S/T, N260S/T, A262S/T, A261N+I263 S/T, A262N+N264S/T, I263N+K265S/T, K265N+N267S/T, A266N+H268S/T, D276N+P278S/T, P278N+V280S/T, E277N+L279S/T, V280N+N282S/T, Y284S/T, S283N+V285 S/T, Y284N, D292N+K294S/T, K293N+Y295 S/T, E294N, F299S/T, I298N+L300S/T, K301N+G303S/T, F302N, G303N+G305S/T, S304N+Y306S/T, Y306N+S308S/T, R312N+F314S/T, V313N+H315T, F314N+K316S/T, H315N+G317S/T, K316N+R138S/T, G317N, R318N+A320S/T, S319N+L321S/T, A320N+V322T, L321N+L323S/T, V322N+Q324S/T, Y325N+R327S/T, R327N+P329S/T, P329N+V331S/T, L330N+D332S/T, D332N+A334S/T, R333N, A334N+C336S/T, T335N+L337S/T, L337N, R338N, S339N+K341T, T340N+F342T; K341N, F342N+I344S/T, T343N+Y345S/T, Y345N+N347S/T, M348S/T, G352N+H354T, F353N, F353N+E355T, H354N+G356S/T, H354V, H354I, E355T, E355N+G357S/T, G356N+R358T, G357N+D359S/T, R358N, Q362N+D364S/T, V370N; T371V; T3711; E372T, E372N+E374S/T, E374N, G375N, W385N+E387T; G386N+E388T, E388N+A390S/T, A390N+K392T, M391N+G393S/T, K392N+K394S/T, K392V, G393T, G393N+Y395S/T, K394N+G396S/T, R403N+V405S/T, I408S/T, K409N+K411S/T, E410N, K411N+K413S/T, and K413N. In some examples, 1, 2, 3, 4, 5, 6, 7, 8, or more, glycosylation sites are introduced.

[0057] Also provided herein are prophylactic subcutaneous methods and regimens that use modified FIX polypeptides containing one or more modifications that eliminates one or more N-glycosylation sites compared to the unmodified FIX polypeptide. For example, N-glycosylation sites at amino acid positions corresponding to N157 or N167 of the mature FIX polypeptide set forth in SEQ ID NO:3 can be eliminated. Exemplary modifications that eliminate an N-glycosylation site include those selected from among modifications corresponding to amino acid replacements N157D, N157Q, N167D, and N167Q. In further examples, the FIX polypeptide contains one or more modifications that eliminates one or more O-glycosylation sites compared to the unmodified FIX polypeptide. For example, O-glycosylation sites that can be eliminated include those at amino acid positions corresponding to positions selected from among S53, S61, T159, and T169, of the mature FIX polypeptide set forth in SEQ ID NO:3. Exemplary modifications that eliminate an N-glycosylation site include those selected from among modifications corresponding to amino acid replacements S53A, S61A, T159A, and T169A. Provided are prophylactic subcutaneous methods and regimens that employ modified FIX polypeptides containing one or more modifications that introduces and/or eliminates one or more sulfation sites, compared to the unmodified FIX polypeptide. In one example, the modified FIX polypeptides contain a modification that eliminates a sulfation site at an amino acid position corresponding to position Y155 of the mature FIX polypeptide set forth in SEQ ID NO:3. Exemplary of such modifications are those that correspond to amino acid replacements Y155H, Y155F, and Y155Q.

[0058] Provided are prophylactic subcutaneous methods and regimens that use modified FIX polypeptides containing one or more modifications that introduces and/or eliminates one or more phosphorylation sites, compared to the unmodified FIX polypeptide. In one example, the modified FIX polypeptide contains a modification that eliminates a phosphorylation site at an amino acid position corresponding to position S158 of the mature FIX polypeptide set forth in SEQ ID NO:3. Exemplary of such modifications are those that correspond to the amino acid replacements S158A, S158D, and S158E. Also provided are FIX polypeptides containing one or more modifications that introduces and/or eliminates one or more β-hydroxylation sites compared to the unmodified FIX polypeptide. In one instance, the modified FIX polypeptides contain a modification that eliminates a β-hydroxylation site at an amino acid position corresponding to position D64 of the mature FIX polypeptide set forth in SEQ ID NO:3. Exemplary of such modifications are those that correspond to the amino acid replacements D64N and D64A.

[0059] Any of the modified FIX polypeptides provided herein can contain any other mutations known in the art, such as, for example, one or more modifications selected from among amino acid replacements Y1A, Y1C, Y1D, Y1E, Y1G, Y1H, Y1K, Y1N, Y1P, Y1Q, Y1R, Y1S, Y1T, S3T, K5A, K5I, K5L, K5F, K5E, L6A, L6C, L6D, L6E, L6G, L6H, L6K, L6N, L6P, L6Q, L6R, L6S, L6T, L6M, F9A, F9C, F9D, F9E, F9G, F9H, F9K, F9N, F9P, F9Q, F9R, F9S, F9T, F9I, F9M, F9W, V10A, V10C, V10D, V10E, V10G, V10H, V10K, V10N, V10P, V10Q, V10R, V10S, V10T, V10F, V10I, V10K, V10M, V10W, V10Y, Q11E, Q11D, Q11A, Q11C, Q11G, Q11P, G12D, G12E, G12G, G12H, G12K, G12N, G12P, G12Q, G12R, G12S, G12T, N13A, N13C, N13G, N13H, N13P, N13T, L14A, L14C, L14D, L14E, L14G, L14H, L14K, L14N, L14P, L14Q, L14R, L14S, L14T, L14F, L14I, L14M, L14V, L14W, L14Y, E15D, E15H, E15P, R16E, R16A, R16C, R16G, R16P, R16T, E17A, E17C, E17G, E17P, E17T, C18D, C18E, C18G, C18H, C18K, C18N, C18P, C18Q, C18R, C18S, C18T, M19A, M19C, M19D, M19E, M19G, M19H, M19K, M19N, M19P, M19Q, M19R, M19S, M19T, M19F, M19I, M19M, M19V, M19W, M19Y, E20A, E20C, E20G, E20P, E20T, E21A, E21C, E21G, E21P, K22H, K22P, K22T, S24H, S24P, F25A, F25C, F25D, F25E, F25G, F25H, F25K, F25N, F25P, F25Q, F25R, F25S, F25T, F251, F25M, F25W, F25Y, E26A, E26C, E26G, E26P, E27A, E27C, E27G, E27H, E27P, E27S, E27T, A28C, A28D, A28E, A28G, A28H, A28K, A28N, A28P, A28Q, A28R, A28S, A28T, R29A, R29C, R29G, R29P, R29F, E30D, E30H, E30P, V31A, V31C, V31D, V31E, V31G, V31H, V31K, V31N, V31P, V31Q, V31R, V31S, V31T, V31F, V31I, V31W, V31Y, F32A, F32C, F32D, F32E, F32G, F32H, F32K, F32N, F32P, F32Q, F32R, F32S, F32T, E33H, E33N, E33P, E33Q, E33S, E33T, N34E, N34D, N34F, N34I, N34L, T35D, T35E, T35A, T35C, T35G, T35P, F41A, F41C, F41D, F41E, F41G, F41H, F41K, F41N, F41P, F41Q, F41R, F41S, F41T, F41M, F41W, F41Y, W42A, W42C, W42D, W42E, W42G, W42H, W42K, W42N, W42P, W42Q, W42R, W42S, W42T, K43A, K43C, K43G, K43P, Q44P, Q44T, Q44, Y45A, Y45C, Y45D, Y45E, Y45G, Y45H, Y45K, Y45N, Y45P, Y45Q, Y45R, Y45S, Y45T, V46A, V46C, V46D, V46E, V46G, V46H, V46K, V46N, V46P, V46Q, V46R, V46S, V46T, V46F, V46I, V46M, V46W, V46Y, D47A, D47C, D47G, D47H, D47P, D47T, G48D, G48E, G48P, G48T, D49H, D49P, D49Q, D49T, Q50A, Q50C, Q50D, Q50G, Q50H, Q50P, Q50T, C51D, C51E, C51G, C51H, C51K, C51N, C51P, C51Q, C51R, C51S, C51T, E52P, E52T, S53A, S53C, S53G, S53H, S53P, S53T, N54H, N54P, N54T, L57A, L57C, L57D, L57E, L57G, L57H, L57K, L57N, L57P, L57Q, L57R, L57S, L57T, L57F, L57I, L57M, L57W, L57Y, G60C, G60D, G60H, G60P, G60T, C62D, C62H, C62P, K63T, D65H, D65T, I66A, I66C, I66D, I66E, I66G, I66H, I66K, I66N, I66P, I66Q, I66R, I66S, I66T, I66M, I66W, I66Y, Y69A, Y69C, Y69D, Y69E, Y69G, Y69H, Y69K, Y69N, Y69P, Y69Q, Y69R, Y69S, Y69T, C71H, C71P, W72A, W72C, W72D, W72E, W72G, W72H, W72K, W72N, W72P, W72Q, W72R, W72S, W72T, W72I, W72Y, F75A, F75C, F75D, F75E, F75G, F75H, F75K, F75N, F75P, F75Q, F75R, F75S, F75T, F77A, F77C, F77D, F77E, F77G, F77H, F77K, F77N, F77P, F77Q, F77R, F77S, F77T, L84A, L84C, L84D, L84E, L84G, L84H, L84K, L84N, L84P, L84Q, L84R, L84S, L84T, L84M, L84W, L84Y, V86I, V86L, V86M, V86F, V86W, V86Y, V86A, V86C, V86D, V86E, V86G, V86H, V86K, V86N, V86P, V86Q, V86R, V86S, V86T, I90A, I90C, I90D, I90E, I90G, I90H, I90K, I90N, I90P, I90Q, I90R, I90S, I90T, I90M, I90W, K91A, K91C, K91G, K91P, N92A, N92C, N92G, N92P, N92T, G93D, G93E, G93H, G93K, G93N, G93P, G93Q, G93R, G93S, G93T, R94A, R94C, R94G, R94P, C95D, C95E, C95G, C95H, C95K, C95N, C95P, C95Q, C95R, C95S, C95T, E96P, E96T, Q97A, Q97C, Q97G, Q97P, F98A, F98C, F98D, F98E, F98G, F98H, F98K, F98N, F98P, F98Q, F98R, F98S, F98T, F98M, F98W, F98Y, K100A, K100C, K100G, K100P, N101H, N101T, A103D, A103E, A103H, A103K, A103N, A103P, A103Q, A103R, A103S, A103T, D104T, K106H, K106P, K106T, V107A, V107C, V107D, V107E, V107G, V107H, V107K, V107N, V107P, V107Q, V107R, V107S, V107T, V108A, V108C, V108D, V108E, V108G, V108H, V108K, V108N, V108P, V108Q, V108R, V108S, V108T, V108F, V108M, V108W, V108Y, S110A, S110C, S110G, S110P, C111D, C111E, C111H, C111K, C111N, C111P, C111Q, C111R, C111S, C111T, T112A, T112C, T112G, T112P, E113D, E113H, E113P, G114D, G114E, G114H, G114K, G114N, G114P, G114Q, G114R, G114S, G114T, Y115A, Y115C, Y115D, Y115E, Y115G, Y115H, Y115K, Y115N, Y115P, Y115Q, Y115R, Y115S, Y115T, Y115M, Y115W, R116P, R116T, L117A, L117C, L117D, L117E, L117G, L117H, L117K, L117N, L117P, L117Q, L117R, L117S, L117T, A118D, A118E, A118H, A118K, A118N, A118P, A118Q, A118R, A118S, A118T, N120D, N120H, N120P, Q121T, S123H, S123T, V128A, V128C, V128D, V128E, V128G, V128H, V128K, V128N, V128P, V128Q, V128R, V128S, V128T, F130A, F130C, F130D, F130E, F130G, F130H, F130K, F130N, F130P, F130Q, F130R, F130S, F130T, V135A, V135C, V135D, V135E, V135G, V135H, V135K, V135N, V135P, V135Q, V135R, V135S, V135T, V135W, V135Y, V137A, V137C, V137D, V137E, V137G, V137H, V137K, V137N, V137P, V137Q, V137R, V137S, V137T, V137M, V137W, V137Y, S138H, S138T, T140D, T140H, S141T, K142H, K142P, L143A, L143C, L143D, L143E, L143G, L143H, L143K, L143N, L143P, L143Q, L143R, L143S, L143T, L143F, L143I, L143M, L143V, L143W, L143Y, R145H, R145P, R145T, A146P, A146T, T148H, T148P, V149A, V149C, V149D, V149E, V149G, V149H, V149K, V149N, V149P, V149Q, V149R, V149S, V149T, V149F, V149I, V149M, V149W, V149Y, F150A, F150C, F150D, F150E, F150G, F150H, F150K, F150N, F150P, F150Q, F150R, F150S, F150T, F150M, F150W, F150Y, D152A, D152C, D152G, D152P, D152S, D152T, V153A, V153C, V153D, V153E, V153G, V153H, V153K, V153N, V153P, V153Q, V153R, V153S, V153T, V153F, V153I, V153M, V153W, V153Y, D154A, D154C, D154G, D154P, D154Q, D154S, Y155A, Y155C, Y155D, Y155E, Y155G, Y155H, Y155K, Y155N, Y155P, Y155Q, Y155R, Y155S, Y155T, Y155M, Y155V, Y155W, V156A, V156C, V156D, V156E, V156G, V156H, V156K, V156N, V156P, V156Q, V156R, V156S, V156T, V156I, V156M, V156W, V156Y, N157A, N157C, N157G, N157H, N157P, N157Q, N157T, S158H, S158P, S158T, T159A, T159C, T159G, T159P, E160A, E160C, E160G, E160P, A161C, A161D, A161E, A161H, A161K, A161N, A161P, A161Q, A161R, A161S, A161T, E162P, E162T, T163A, T163C, T163G, T163P, I164A, I164C, I164D, I164E, I164G, I164H, I164K, I164N, I164P, I164Q, I164R, I164S, I164T, L165A, L165C, L165D, L165E, L165G, L165H, L165K, L165N, L165P, L165Q, L165R, L165S, L165T, L165M, L165W, L165Y, I168A, I168C, I168D, I168E, I168G, I168H, I168K, I168N, I168P, I168Q, I168R, I168S, I168T, F175A, F175C, F175D, F175E, F175G, F175H, F175K, F175N, F175P, F175Q, F175R, F175S, F175T, F178A, F178C, F178D, F178E, F178G, F178H, F178K, F178N, F178P, F178Q, F178R, F178S, F178T, F178M, F178W, F178Y, T179A, T179C, T179G, T179P, R180A, R180C, R180D, R180G, R180H, R180P, V181A, V181C, V181D, V181E, V181G, V181H, V181K, V181N, V181P, V181Q, V181R, V181S, V181T, V181F, V181I, V181M, V181W, V181Y, V182A, V182C, V182D, V182E, V182G, V182H, V182K, V182N, V182P, V182Q, V182R, V182S, V182T, V182F, V182I, V182M, V182W, V182Y, G183D, G183E, G183H, G183K, G183N, G183P, G183Q, G183S, G183T, G184D, G184E, G184H, G184K, G184N, G184P, G184Q, G184R, G184S, G184T, E185A, E185C, E185G, E185H, E185P, E185T, D186A, D186C, D186G, D186H, D186P, D186T, A187C, A187D, A187E, A187G, A187H, A187K, A187N, A187P, A187Q, A187R, A187S, A187T, K188A, K188C, K188G, K188H, K188P, K188T, G190D, G190E, G190H, G190K, G190N, G190P, G190Q, G190R, G190S, G190T, F192A, F192C, F192D, F192E, F192G, F192H, F192K, F192N, F192P, F192Q, F192R, F192S, F192T, F192W, F192Y, W194A, W194C, W194D, W194E, W194G, W194H, W194K, W194N, W194P, W194Q, W194R, W194S, W194T, Q195H, Q195P, Q195T, V196A, V196C, V196D, V196E, V196G, V196H, V196K, V196N, V196P, V196Q, V196R, V196S, V196T, V196F, V196I, V196M, V196W, V196Y, V197A, V197C, V197D, V197E, V197G, V197H, V197K, V197N, V197P, V197Q, V197R, V197S, V197T, V197F, V197I, V197M, V197W, V197Y, L198A, L198C, L198D, L198E, L198G, L198H, L198K, L198N, L198P, L198Q, L198R, L198S, L198T, L198I, L198Y, N199A, N199C, N199G, N199H, N199P, N199S, N199T, G200P, G200T, K201A, K201C, K201D, K201E, K201G, K201H, K201N, K201P, K201Q, K201S, K201T, V202A, V202C, V202D, V202E, V202G, V202H, V202K, V202N, V202P, V202Q, V202R, V202S, V202T, V202F, V202I, V202M, V202W, V202Y, D203A, D203C, D203G, D203P, D203T, A204C, A204D, A204E, A204G, A204H, A204K, A204N, A204P, A204Q, A204R, A204S, A204T, F205A, F205C, F205D, F205E, F205G, F205H, F205K, F205N, F205P, F205Q, F205R, F205S, F205T, F205M, F205V, F205W, F205Y, G207H, G207P, G208C, G208D, G208E, G208H, G208K, G208N, G208P, G208Q, G208R, G208S, G208T, S209A, S209C, S209G, S209P, I210A, I210C, I210D, I210E, I210G, I210H, I210K, I210N, I210P, I210Q, I210R, I210S, I210T, I210F, I210W, I210Y, V211A, V211C, V211D, V211E, V211G, V211H, V211K, V211N, V211P, V211Q, V211R, V211S, V211T, V211F, V2111, V211M, V211W, N212A, N212C, N212G, N212P, E213H, E213P, E213S, E213T, K214T, W215A, W215C, W215D, W215E, W215G, W215H, W215K, W215N, W215P, W215Q, W215R, W215S, W215T, I216A, I216C, I216D, I216E, I216G, I216H, I216K, I216N, I216P, I216Q, I216R, I216S, I216T, V217A, V217C, V217D, V217E, V217G, V217H, V217K, V217N, V217P, V217Q, V217R, V217S, V217T, V2171, V217Y, A219H, A219P, A219T, V223A, V223C, V223D, V223E, V223G, V223H, V223K, V223N, V223P, V223Q, V223R, V223S, V223T, V223M, V223W, V223Y, G226P, V227A, V227C, V227D, V227E, V227G, V227H, V227K, V227N, V227P, V227Q, V227R, V227S, V227T, V227F, V2271, V227M, V227W, V227Y, K228A, K228C, K228G, K228H, K228P, I229A, I229C, I229D, I229E, I229G, I229H, I229K, I229N, I229P, I229Q, I229R, I229S, I229T, I229M, I229W, I229Y, T230A, T230C, T230G, T230P, V231A, V231C, V231D, V231E, V231G, V231H, V231K, V231N, V231P, V231Q, V231R, V231S, V231T, V232A, V232C, V232D, V232E, V232G, V232H, V232K, V232N, V232P, V232Q, V232R, V232S, V232T, V232F, V2321, V232M, V232W, V232Y, A233C, A233D, A233E, A233G, A233H, A233K, A233N, A233P, A233Q, A233R, A233S, A233T, A233V, G234D, G234E, G234H, G234K, G234N, G234P, G234Q, G234R, G234S, G234T, E235H, E235N, E235P, E235Q, E235S, E235T, H236A, H236C, H236G, H236P, N237A, N237C, N237G, N237P, N237T, I238A, I238C, I238D, I238E, I238G, I238H, I238K, I238N, I238P, I238Q, I238R, I238S, I238T, E239A, E239C, E239G, E239P, E240H, E240T, V250A, V250C, V250D, V250E, V250G, V250H, V250K, V250N, V250P, V250Q, V250R, V250S, V250T, V250M, V250W, V250Y, I251A, I251C, I251D, I251E, I251G, I251H, I251K, I251N, I251P, I251Q, I251R, I251S, I251T, I253A, I253C, I253D, I253E, I253G, I253H, I253K, I253N, I253P, I253Q, I253R, I253S, I253T, I253M, I253W, I253Y, I254A, I254C, I254D, I254E, I254G, I254H, I254K, I254N, I254P, I254Q, I254R, I254S, I254T, P255H, H256P, H256T, H257A, H257C, H257G, H257P, N258P, N258T, Y259A, Y259C, Y259D, Y259E, Y259G, Y259H, Y259K, Y259N, Y259P, Y259Q, Y259R, Y259S, Y259T, Y259M, Y259W, Y259F, N260A, N260C, N260G, N260P, A261D, A261E, A261H, A261K, A261N, A261P, A261Q, A261R, A261S, A261T, A262C, A262D, A262E, A262G, A262H, A262K, A262N, A262P, A262Q, A262R, A262S, A262T, I263A, I263C, I263D, I263E, I263G, I263H, I263K, I263N, I263P, I263Q, I263R, I263S, I263T, I263M, I263V, I263W, I263Y, N264A, N264C, N264D, N264G, N264H, N264P, K265A, K265C, K265G, K265H, K265P, K265T, Y266A, Y266C, Y266D, Y266E, Y266G, Y266H, Y266K, Y266N, Y266P, Y266Q, Y266R, Y266S, Y266T, Y266M, Y266W, N267A, N267C, N267G, N267H, N267P, N267T, H268P, D269A, D269C, D269E, D269G, D269H, D269N, D269P, D269Q, D269S, D269T, I270A, I270C, I270D, I270E, I270G, I270H, I270K, I270N, I270P, I270Q, I270R, I270S, I270T, I270M, I270W, A271C, A271D, A271E, A271G, A271H, A271K, A271N, A271P, A271Q, A271R, A271S, A271T, L272A, L272C, L272D, L272E, L272G, L272H, L272K, L272N, L272P, L272Q, L272R, L272S, L272T, L272F, L273A, L273C, L273D, L273E, L273G, L273H, L273K, L273N, L273P, L273Q, L273R, L273S, L273T, L273F, L273I, L273M, L273V, L273W, L273Y, E274A, E274C, E274G, E274P, E274T, L275A, L275C, L275D, L275E, L275G, L275H, L275K, L275N, L275P, L275Q, L275R, L275S, L275T, L275W, L275Y, D276P, D276S, D276T, E277A, E277C, E277G, E277P, E277V, E277N, E277D, E277E, E277Q, E277H, E277I, E277L, E277M, E277F, E277S, E277T, E277W, E277Y, P278T, L279A, L279C, L279D, L279E, L279G, L279H, L279K, L279N, L279P, L279Q, L279R, L279S, L279T, L279I, L279Y, V280A, V280C, V280D, V280E, V280G, V280H, V280K, V280N, V280P, V280Q, V280R, V280S, V280T, V280F, V280I, V280W, V280Y, L281A, L281C, L281D, L281E, L281G, L281H, L281K, L281N, L281P, L281Q, L281R, L281S, L281T, L281F, L281I, L281V, L281W, L281Y, S283A, S283C, S283G, S283P, Y284A, Y284C, Y284D, Y284E, Y284G, Y284H, Y284K, Y284N, Y284P, Y284Q, Y284R, Y284S, Y284T, Y284M, V285A, V285C, V285D, V285E, V285G, V285H, V285K, V285N, V285P, V285Q, V285R, V285S, V285T, V285M, V285W, V285Y, T286A, T286C, T286G, T286P, I288A, I288C, I288D, I288E, I288G, I288H, I288K, I288N, I288P, I288Q, I288R, I288S, I288T, C289D, C289H, C289P, I290A, I290C, I290D, I290E, I290G, I290H, I290K, I290N, I290P, I290Q, I290R, I290S, I290T, I290Y, A291D, A291E, A291H, A291K, A291N, A291P, A291Q, A291R, A291S, A291T, D292A, D292C, D292G, D292P, D292T, K293H, K293P, K293T, Y295A, Y295C, Y295D, Y295E, Y295G, Y295H, Y295K, Y295N, Y295P, Y295Q, Y295R, Y295S, Y295T, Y295W, T296A, T296C, T296G, T296P, N297A, N297C, N297G, N297P, I298A, I298C, I298D, I298E, I298G, I298H, I298K, I298N, I298P, I298Q, I298R, I298S, I298T, F299A, F299C, F299D, F299E, F299G, F299H, F299K, F299N, F299P, F299Q, F299R, F299S, F299T, L300A, L300C, L300D, L300E, L300G, L300H, L300K, L300N, L300P, L300Q, L300R, L300S, L300T, L300F, L300I, L300M, L300V, L300W, L300Y, K301A, K301C, K301G, K301P, K301T, F302A, F302C, F302D, F302E, F302G, F302H, F302K, F302N, F302P, F302Q, F302R, F302S, F302T, G303H, G303P, G303T, S304A, S304C, S304G, S304P, S304T, G305D, G305E, G305H, G305N, G305P, G305Q, G305S, G305T, Y306A, Y306C, Y306D, Y306E, Y306G, Y306H, Y306K, Y306N, Y306P, Y306Q, Y306R, Y306S, Y306T, V307A, V307C, V307D, V307E, V307G, V307H, V307K, V307N, V307P, V307Q, V307R, V307S, V307T, S308P, S308T, W310A, W310C, W310D, W310E, W310G, W310H, W310K, W310N, W310P, W310Q, W310R, W310S, W310T, G311H, V313A, V313C, V313D, V313E, V313G, V313H, V313K, V313N, V313P, V313Q, V313R, V313S, V313T, F314A, F314C, F314D, F314E, F314G, F314H, F314K, F314N, F314P, F314Q, F314R, F314S, F314T, F314M, F314W, F314Y, H315A, H315C, H315G, H315P, K316A, K316C, K316G, K316P, G317C, G317D, G317E, G317H, G317K, G317N, G317P, G317Q, G317R, G317S, G317T, R318A, R318C, R318G, R318P, S319D, S319H, S319N, S319P, S319Q, A320C, A320D, A320E, A320G, A320H, A320K, A320N, A320P, A320Q, A320R, A320S, A320T, L321A, L321C, L321D, L321E, L321G, L321H, L321K, L321N, L321P, L321Q, L321R, L321S, L321T, V322A, V322C, V322D, V322E, V322G, V322H, V322K, V322N, V322P, V322Q, V322R, V322S, V322T, V322W, V322Y, L323A, L323C, L323D, L323E, L323G, L323H, L323K, L323N, L323P, L323Q, L323R, L323S, L323T, L323F, L323I, L323M, L323V, L323W, L323Y, Q324A, Q324C, Q324G, Q324P, Y325A, Y325C, Y325D, Y325E, Y325G, Y325H, Y325K, Y325N, Y325P, Y325Q, Y325R, Y325S, Y325T, Y325W, L326A, L326C, L326D, L326E, L326G, L326H, L326K, L326N, L326P, L326Q, L326R, L326S, L326T, L326F, L326I, L326M, L326V, L326W, L326Y, R327A, R327C, R327G, R327H, R327P, V328A, V328C, V328D, V328E, V328G, V328H, V328K, V328N, V328P, V328Q, V328R, V328S, V328T, V328F, V328I, V328M, V328W, V328Y, L330A, L330C, L330D, L330E, L330G, L330H, L330K, L330N, L330P, L330Q, L330R, L330S, L330T, L330F, L330I, L330V, L330W, L330Y, V331A, V331C, V331D, V331E, V331G, V331H, V331K, V331N, V331P, V331Q, V331R, V331S, V331T, V331F, V331I, V331M, V331W, V331Y, D332A, D332C, D332G, D332P, R333A, R333C, R333D, R333E, R333G, R333H, R333N, R333P, R333Q, R333R, R333S, R333T, A334C, A334D, A334E, A334G, A334H, A334K, A334N, A334P, A334Q, A334R, A334S, A334T, T335A, T335C, T335G, T335P, C336D, C336E, C336H, C336K, C336N, C336P, C336Q, C336R, C336S, C336T, L337A, L337C, L337D, L337E, L337G, L337H, L337K, L337N, L337P, L337Q, L337R, L337S, L337T, R338A, R338E, R338V, R338T, R338C, R338G, R338P, R338I, R338F, R338W, R338S, S339P, S339T, K341A, K341C, K341G, K341P, F342A, F342C, F342D, F342E, F342G, F342H, F342K, F342N, F342P, F342Q, F342R, F342S, F342T, F342M, F342W, T343A, T343C, T343G, T343P, I344A, I344C, I344D, I344E, I344G, I344H, I344K, I344N, I344P, I344Q, I344R, I344S, I344T, Y345F, Y345A, Y345C, Y345D, Y345E, Y345G, Y345H, Y345K, Y345N, Y345P, Y345Q, Y345R, Y345S, Y345T, Y345M, Y345W, N346A, N346C, N346G, N346P, N347H, N347P, M348A, M348C, M348D, M348E, M348G, M348H, M348K, M348N, M348P, M348Q, M348R, M348S, M348T, F349A, F349C, F349D, F349E, F349G, F349H, F349K, F349N, F349P, F349Q, F349R, F349S, F349T, F349I, F349M, F349W, F349Y, C350D, C350H, C350P, C350T, A351E, A351H, A351N, A351P, A351Q, A351R, A351S, A351T, G352A, G352C, G352P, F353A, F353C, F353D, F353E, F353G, F353H, F353K, F353N, F353P, F353Q, F353R, F353S, F353T, F353I, F353M, F353W, H354A, H354C, H354G, H354P, E355A, E355C, E355D, E355G, E355H, E355K, E355N, E355P, E355Q, E355S, E355T, G356D, G356E, G356H, G356K, G356N, G356P, G356Q, G356R, G356S, G356T, G357D, G357E, G357H, G357K, G357N, G357P, G357Q, G357R, G357S, G357T, R358D, R358E, R358H, R358K, R358N, R358P, R358Q, R358R, R358S, R358T, D359A, D359C, D359G, D359P, D359Q, D359S, D359T, S360A, S360C, S360G, S360P, C361D, C361E, C361H, C361K, C361N, C361P, C361Q, C361R, C361S, C361T, V370A, V370C, V370D, V370E, V370G, V370H, V370K, V370N, V370P, V370Q, V370R, V370S, V370T, V370W, V370Y, V373A, V373C, V373D, V373E, V373G, V373H, V373K, V373N, V373P, V373Q, V373R, V373S, V373T, V373F, V373I, V373M, V373W, E374A, E374C, E374G, E374P, G375H, S377A, S377C, S377G, S377P, F378A, F378C, F378D, F378E, F378G, F378H, F378K, F378N, F378P, F378Q, F378R, F378S, F378T, F378W, L379A, L379C, L379D, L379E, L379G, L379H, L379K, L379N, L379P, L379Q, L379R, L379S, L379T, L379I, L379M, L379W, L379Y, T380A, T380C, T380G, T380P, G381D, G381E, G381H, G381K, G381N, G381P, G381Q, G381R, G381S, G381T, I382A, I382C, I382D, I382E, I382G, I382H, I382K, I382N, I382P, I382Q, I382R, I382S, I382T, I382M, I382W, I382Y, I383A, I383C, I383D, I383E, I383G, I383H, I383K, I383N, I383P, I383Q, I383R, I383S, I383T, I383V, S384A, S384C, S384G, S384P, W385A, W385C, W385D, W385E, W385G, W385H, W385K, W385N, W385P, W385Q, W385R, W385S, W385T, W385M, E387A, E387C, E387G, E387H, E387P, E387T, E388H, E388N, E388G, E388P, E388Q, E388T, A390C, A390D, A390E, A390G, A390H, A390K, A390N, A390P, A390Q, A390R, A390S, M391A, M391C, M391D, M391E, M391G, M391H, M391K, M391N, M391P, M391Q, M391R, M391S, M391T, M391F, M391I, M391W, M391Y, K392A, K392C, K392G, K392P, G393C, G393D, G393E, G393H, G393K, G393N, G393P, G393Q, G393R, G393S, G393T, Y395A, Y395C, Y395D, Y395E, Y395G, Y395H, Y395K, Y395N, Y395P, Y395Q, Y395R, Y395S, Y395T, Y398A, Y398C, Y398D, Y398E, Y398G, Y398H, Y398K, Y398N, Y398P, Y398Q, Y398R, Y398S, Y398T, K400H, V401A, V401C, V401D, V401E, V401G, V401H, V401K, V401N, V401P, V401Q, V401R, V401S, V401T, V401F, V401I, V401M, V401W, V401Y, S402A, S402C, S402G, S402P, R403A, R403C, R403G, R403P, R403T, Y404A, Y404C, Y404D, Y404E, Y404G, Y404H, Y404K, Y404N, Y404P, Y404Q, Y404R, Y404S, Y404T, V405A, V405C, V405D, V405E, V405G, V405H, V405K, V405N, V405P, V405Q, V405R, V405S, V405T, V405W, V405Y, N406F, N406H, N406I, N406L, N406P, N406W, N406Y, W407D, W407E, W407F, W407H, W407I, W407K, W407N, W407P, W407Q, W407R, W407S, W407T, W407Y, I408D, I408E, I408H, I408K, I408N, I408P, I408Q, I408R, I408S, I408T, K409F, K409H, K409I, K409P, K409T, K409V, K409W, K409Y, E410H, K411A, K411C, K411G, K411I, K411P, K411T, K411V, K411W, K411Y, K413T, Y1I, S3Q, S3H, S3N, G4Q, G4H, G4N, K5N, K5Q, L6I, L6V, E7Q, E7H, E7N, E8Q, E8H, E8N, F9V, E15Q, E15N, R16H, R16Q, E17Q, E17H, E17N, E20Q, E20H, E20N, E21Q, E21H, E21N, K22N, K22Q, S24Q, S24N, F25V, E26Q, E26H, E26N, E27Q, E27N, R29H, R29Q, E30Q, E30N, F32I, F32V, T35Q, T35H, T35N, E36Q, E36H, E36N, R37H, R37Q, T38Q, T38H, T38N, T39Q, T39H, T39N, E40Q, E40H, E40N, F41I, F41V, K43N, K43Q, Y45I, D47N, D47Q, G48Q, G48H, G48N, D49N, E52Q, E52H, E52N, S53Q, S53N, P55A, P55S, L57V, N58Q, N58S, G59Q, G59H, G59N, G60Q, G60N, S61Q, S61H, S61N, K63N, K63Q, D64N, D64Q, D65N, D65Q, S68Q, S68H, S68N, Y69I, E70Q, E70H, E70N, P74A, P74S, F75I, F75V, G76Q, G76H, G76N, F77I, F77V, E78Q, E78H, E78N, G79Q, G79H, G79N, K80N, K80Q, E83Q, E83H, E83N, L84I, L84V, D85N, D85Q, T87Q, T87H, T87N, K91N, K91Q, N92Q, N92S, R94H, R94Q, E96Q, E96H, E96N, F98I, F98V, K100N, K100Q, S102Q, S102H, S102N, D104N, D104Q, K106N, K106Q, S110Q, S110H, S110N, T112Q, T112H, T112N, E113Q, E113N, Y115I, R116H, R116Q, L117I, L117V, E119Q, E119H, E119N, K122N, K122Q, S123Q, S123N, E125Q, E125H, E125N, P126A, P126S, A127Q, A127H, A127N, P129A, P129S, P131A, P131S, G133Q, G133H, G133N, R134H, R134Q, S136Q, S136H, S136N, S138Q, S138N, T140Q, T140N, S141Q, S141H, S141N, K142N, K142Q, T144Q, T144H, T144N, R145Q, A146Q, A146H, A146N, E147Q, E147H, E147N, T148Q, T148N, P151A, P151S, D152N, D152Q, D154N, Y155I, S158Q, S158N, T159Q, T159H, T159N, E160Q, E160H, E160N, E162Q, E162H, E162N, T163Q, T163H, T163N, L165I, L165V, D166N, D166Q, T169Q, T169H, T169N, S171Q, S171H, S171N, T172Q, T172H, T172N, S174Q, S174H, S174N, F175I, F175V, D177N, D177Q, F178I, F178V, T179Q, T179H, T179N, R180Q, E185Q, E185N, D186N, D186Q, K188N, K188Q, P189A, P189S, F192I, F192V, F192IH, P193A, P193S, W194I, L198V, N199Q, G200Q, G200H, G200N, D203N, D203Q, F205I, G207Q, G207N, S209Q, S209H, S209N, E213Q, E213N, K214N, K214Q, T218Q, T218H, T218N, A219Q, A219N, A220Q, A220H, A220N, E224Q, E224H, E224N, T225Q, T225H, T225N, G226Q, G226H, G226N, K228N, K228Q, T230Q, T230H, T230N, E239Q, E239H, E239N, E240Q, E240N, T241Q, T241H, T241N, E242Q, E242H, E242N, T244Q, T244H, T244N, E245Q, E245H, E245N, K247N, K247Q, R248H, R248Q, R252H, R252Q, P255A, P255S, Y259I, K265N, K265Q, Y266I, L272I, L272V, E274Q, E274H, E274N, L275I, L275V, D276N, D276Q, E277Q, E277H, E277N, P278A, P278S, L279V, S283Q, S283H, S283N, Y284I, T286Q, T286H, T286N, P287A, P287S, D292N, D292Q, K293N, K293Q, E294Q, E294H, E294N, Y295I, T296Q, T296H, T296N, F299I, F299V, K301N, K301Q, F302I, F302V, G303Q, G303N, S304Q, S304H, S304N, Y306I, S308Q, S308H, S308N, G309Q, G309H, G309N, G311Q, G311N, R312H, R312Q, F314I, F314V, K316N, K316Q, R318H, R318Q, L321I, L321V, Y325I, R327Q, P329A, P329S, D332N, D332Q, T335Q, T335H, T335N, L337I, L337V, R338H, R338Q, S339Q, S339H, S339N, T340Q, T340H, T340N, K341N, K341Q, F342I, F342V, T343Q, T343H, T343N, Y345I, M348I, M348V, F349V, G352Q, G352H, G352N, F353V, D359N, S360Q, S360H, S360N, G363Q, G363H, G363N, D364N, D364Q, S365Q, S365H, S365N, G366Q, G366H, G366N, G367Q, G367H, G367N, P368A, P368S, T371Q, T371H, T371N, E372Q, E372H, E372N, E374Q, E374H, E374N, G375Q, G375N, T376Q, T376H, T376N, S377Q, S377H, S377N, F378I, F378V, L379V, T380Q, T380H, T380N, S384Q, S384H, S384N, G386Q, G386H, G386N, E387Q, E387N, M391V, K392N, K392Q, K394N, K394Q, Y395I, G396Q, G396H, G396N, I397Q, I397H, I397N, Y398I, T399Q, T399H, T399N, K400N, K400Q, S402Q, S402H, S402N, R403H, R403Q, Y404I, K409N, K409Q, E410Q, E410N, K411N, K411Q, T412Q, T412H, T412N, K413N, K413Q, L414I, L414V, T415Q, T415H, T415N, R252A, H268A, K293A, K400A, R403A, R403E, and K411A.

[0060] In some instances, the modified FIX polypeptides for use in the prophylactic subcutaneous methods and regimens exhibit increased resistance to antithrombin III (ATIII), heparin and/or the AT-III/heparin complex, compared with the unmodified FIX polypeptide. For example, the modified FIX polypeptides can exhibit at least or about 1%, 2%, 3%, 4%, 5%, 6%, 7%, 8%, 9%, 10%, 20%, 30%, 40%, 50%, 60%, 70%, 80%, 90%, 91%, 92%, 93%, 94%, 95%, 96%, 97%, 98%, 99%, 100%, 200%, 300%, 400%, 500%, or more, increased resistance to antithrombin III and/or heparin, compared with the unmodified FIX polypeptide. In further instances, the modified FIX polypeptides exhibit increased catalytic activity compared with the unmodified FIX polypeptide. This can be in the presence or absence of FVIIIa. For example, the modified FIX polypeptides can exhibit at least or about 1%, 2%, 3%, 4%, 5%, 6%, 7%, 8%, 9%, 10%, 20%, 30%, 40%, 50%, 60%, 70%, 80%, 90%, 91%, 92%, 93%, 94%, 95%, 96%, 97%, 98%, 99%, 100%, 200%, 300%, 400%, 500%, or more, catalytic activity compared to an unmodified FIX polypeptide.

[0061] The modified FIX polypeptides further can exhibit improved pharmacokinetic properties compared with the unmodified FIX polypeptide, such as, for example, decreased clearance (e.g., at least or about 1%, 2%, 3%, 4%, 5%, 6%, 7%, 8%, 9%, 10%, 20%, 30%, 40%, 50%, 60%, 70%, 80%, 90%, 91%, 92%, 93%, 94%, 95%, 96%, 97%, 98%, or 99%, of the clearance of an unmodified FIX polypeptide), altered volume of distribution (e.g., decreased by at least or about 1%, 2%, 3%, 4%, 5%, 6%, 7%, 8%, 9%, 10%, 20%, 30%, 40%, 50%, 60%, 70%, 80%, 90%, 91%, 92%, 93%, 94%, 95%, 96%, 97%, 98%, or 99%, of the volume of distribution of an unmodified FIX polypeptide, or increased by at least or about 1%, 2%, 3%, 4%, 5%, 6%, 7%, 8%, 9%, 10%, 20%, 30%, 40%, 50%, 60%, 70%, 80%, 90%, 91%, 92%, 93%, 94%, 95%, 96%, 97%, 98%, 99%, 100%, 200%, 300%, 400%, 500%, or more, of the volume of distribution of an unmodified FIX polypeptide), increased in vivo recovery (e.g., by at least or about 1%, 2%, 3%, 4%, 5%, 6%, 7%, 8%, 9%, 10%, 20%, 30%, 40%, 50%, 60%, 70%, 80%, 90%, 91%, 92%, 93%, 94%, 95%, 96%, 97%, 98%, 99%, 100%, 200%, 300%, 400%, 500%, or more, of the in vivo recovery of an unmodified FIX polypeptide), increased total modified FIX polypeptide exposure in vivo (e.g., increased by at least or about 1%, 2%, 3%, 4%, 5%, 6%, 7%, 8%, 9%, 10%, 20%, 30%, 40%, 50%, 60%, 70%, 80%, 90%, 91%, 92%, 93%, 94%, 95%, 96%, 97%, 98%, 99%, 100%, 200%, 300%, 400%, 500%, or more, of the total exposure in vivo of an unmodified FIX polypeptide), increased serum half-life (e.g., by at least or about 1%, 2%, 3%, 4%, 5%, 6%, 7%, 8%, 9%, 10%, 20%, 30%, 40%, 50%, 60%, 70%, 80%, 90%, 91%, 92%, 93%, 94%, 95%, 96%, 97%, 98%, 99%, 100%, 200%, 300%, 400%, 500%, or more, of the serum half-life of an unmodified FIX polypeptide), and/or increased mean resonance time (MRT) compared to the unmodified FIX polypeptide (e.g., increased by at least or about 1%, 2%, 3%, 4%, 5%, 6%, 7%, 8%, 9%, 10%, 20%, 30%, 40%, 50%, 60%, 70%, 80%, 90%, 91%, 92%, 93%, 94%, 95%, 96%, 97%, 98%, 99%, 100%, 200%, 300%, 400%, 500%, or more, of the MRT in vivo of an unmodified FIX polypeptide). In some instances, wherein the improved pharmacokinetic property is increased serum half-life, the serum half-life is α, β or γ phase.

[0062] In some instances, the modified FIX polypeptides exhibit increased procoagulant activity compared with the unmodified FIX polypeptide, such as, for example, at least or about 1%, 2%, 3%, 4%, 5%, 6%, 7%, 8%, 9%, 10%, 20%, 30%, 40%, 50%, 60%, 70%, 80%, 90%, 91%, 92%, 93%, 94%, 95%, 96%, 97%, 98%, 99%, 100%, 200%, 300%, 400%, 500%, or more, than the procoagulant activity of an unmodified FIX polypeptide.

[0063] In some examples, the unmodified FIX polypeptide has a sequence of amino acids set forth in SEQ ID NO:3. Thus, provided herein are prophylactic subcutaneous methods and regimens using modified FIX polypeptides having a sequence of amino acids set forth in any of SEQ ID NOs: 75-272. In other examples, the unmodified FIX polypeptide is a variant of the polypeptide set forth in SEQ ID NO:3, such as an allelic or species variant having at least 40%, 50%, 60%, 70%, 80%, 90%, 91%, 92%, 93%, 94%, 95%, 96%, 97%, 98%, or 99%, sequence identity to the polypeptide set forth in SEQ ID NO: 3, excluding the modification(s).

[0064] Also intended for use in the prophylactic subcutaneous methods and regimens herein are all forms of the modified FIX polypeptides, including single-chain and two-chain FIX polypeptides, and active or activated FIX polypeptides. In some examples, activation is effected by proteolytic cleavage by Factor IX (FIXa), or by the Tissue Factor/Factor VIIa complex.

[0065] In some examples, the modified FIX polypeptides have only the primary sequence modified by insertion, deletion, or replacement of amino acid residues. In other examples, there is a chemical modification or a post-translational modification (e.g., the modified FIX polypeptides are glycosylated, carboxylated, hydroxylated, sulfated, phosphorylated, albuminated, or conjugated to a polyethylene glycol (PEG) moiety). The modified FIX polypeptides can be modified to have extended half-life. For example, the modified FIX polypeptides can be hyperglycosylated and/or PEGylated, and/or albuminated. The FIX polypeptides can be chimeric or fusion FIX polypeptides, such as by inclusion of a multimerization domain, such as an Fc domain.

[0066] The modified FIX polypeptides can contain 1, 2, 3, 4, 5, 6, 7, 8, 9, 10, or more, modifications, or 1, 2, 3, 4, 5, 6, 7, 8, 9, 10, 20, 30, 40, 50, or 60, or more, modifications, so long as the polypeptide retains at least one FIX activity (e.g., Factor VIIIa binding, Factor X binding, phospholipid binding, and/or coagulant activity) of the unmodified FIX polypeptide. For example, the modified FIX polypeptide can retain at least about or 1%, 2%, 3%, 4%, 5%, 10%, 20%, 30%, 40%, 50%, 60%, 70%, 80%, 90%, 95%, 96%, 97%, 98%, 99%, 100%, 200%, 300%, 400%, 500%, or more, of an activity of the unmodified FIX polypeptide. In some examples, the activities that are retained are increased compared to the unmodified FIX polypeptide. In other examples, the activities that are retained are decreased compared to the unmodified FIX polypeptide. The activities can be measured in vitro, ex vivo, or in vivo.

[0067] Kits containing any of the pharmaceutical compositions provided herein, a device for administration of the composition and, optionally, instructions for subcutaneous administration, also are provided. The compositions can be provided in syringes or other such devices for single dosage administration.

### BRIEF DESCRIPTION OF THE DRAWINGS

[0068] FIG. 1 depicts the coagulation cascade. The figure shows the intrinsic pathway and the extrinsic pathway of coagulation for the independent production of FXa, and convergence of the pathways to a common pathway to generate thrombin and fibrin for the formation of a clot. These pathways are interconnected. The figure depicts the order of molecules involved in the activation cascade in which a zymogen is converted to an activated protease by cleavage of one or more peptide bonds. The activated protease then serves as the activating protease for the next zymogen molecule in the cascade, ultimately resulting in clot formation.

[0069] FIG. 2 depicts the cell based model of coagulation (see, e.g., Hoffman et al. (2001) J. Thromb. Haemost. 85:958-965). The figure depicts the coagulation events as being separated into three phases, where initiation of coagulation is effected by the activation of FX to FXa by the TF/FVIIa complex on the TF-bearing cell, resulting in the generation of a small amount of thrombin after activation by FXa/FVa. Amplification takes place when thrombin binds to and activates the platelets, and initiates the activation of sufficient quantities of the appropriate coagulation factors to form the FVIIIa/FIXa and FVa/FXa complexes. Propagation of coagulation occurs on the surface of large numbers of activated platelets at the site of injury, resulting in a burst of thrombin generation that is sufficiently large to generate enough fibrin from fibrinogen to establish a clot at the site of injury.

[0070] FIGS. 3A-3D provide an alignment of various Factor IX polypeptides, including species variants and modified Factor IX polypeptides (SEQ ID NOs: 2-5, 14, 20, 172, 267, 247, 325, 346, 347, 360, 365, 366, 406). Also included are SEQ ID NO:6 from U.S. Pat. No. 7,700,734, containing mutations V86A/E277A/R338A, and SEQ ID NO:2 from U.S. Pat. No. 7,125,841. An “*” means that the residues or nucleotides in that column are identical in all sequences in the alignment; a “:” means that conserved substitutions have been observed; and a “.” means that semi-conserved substitutions are observed. As described herein, residues corresponding to positions in SEQ ID NO:3 can be determined by alignment with SEQ ID NO:3. Residues corresponding to Y155, R318, R338, T343, R403, and E410 are indicated in boxed text.

[0071] FIG. 4 depicts the primary amino acid sequence of the mature form of a variant FIX polypeptide that has three mutations: R318Y/R338E/T343R (see, SEQ ID NO:394), which is a mature form of FIX that has 415 amino acids, and includes 3 point mutations introduced into 2 distinct, solvent exposed surface loops of the FIX protein. The FIX polypeptide of SEQ ID NO:394 also is referred to herein as CB2679d and/or ISU304.

[0072] FIG. 5 illustrates that structure and domains of the mature form of FIX (of SEQ ID NO:394) that has three mutations: R318Y/R338E/T343R (CB2679d).

[0073] FIG. 6 shows that the modified FIX polypeptide of SEQ ID NO:394, with the replacements R318Y/R338E/T343R, exhibits enhanced activity in vitro and in vivo. In vitro, the FIX of SEQ ID NO:394, with the replacements R318Y/R338E/T343R, exhibits approximately 3-fold enhanced catalytic efficiency for the activation of FX, 10-fold enhanced affinity for FVIIIa, and 15-fold resistance to inhibition by ATIII. In vivo, the FIX of SEQ ID NO:394, with the replacements R318Y/R338E/T343R, displays 20-fold enhanced potency for inhibition of bleeding in a standard murine hemophilia tail cut model, a 17-fold reduction in activated partial thromboplastin time (aPTT), and an 8-fold prolonged correction of aPTT activity compared with BeneFIX® FIX.

[0074] FIG. 7 depicts a schematic of the nucleic acid construct, including the ITRs, for encapsulation into the capsids described herein.

[0075] FIGS. 8A-8C depict an alignment between the human FIX containing the replacements R318Y/T343R/R338E and optimized for expression in human at a threshold of 1.0 (set forth in SEQ ID NO: 532, top), and human FIX containing the replacements R318Y/T343R/R338E and optimized for expression in mouse (set forth in SEQ ID NO: 560, bottom). The consensus sequence is listed in the top row. Highlighted nucleotides in the mouse optimized and human optimized sequences designate differences between the two. The alignments demonstrate 91.4% identity between the two sequences.

[0076] FIGS. 9A-9D depict alignment between and among the human wild-type, modified FIX (with the replacements R318Y/T343R/R338E), and FIX Padua (with the replacement R338L), and forms that were optimized for expression in human at a threshold of 0.5, 0.8, and 1.0, and optimized for expression in mouse. The consensus sequence is listed above the other rows. The top row is human wild-type FIX optimized for expression in mouse (SEQ ID NO: 558). The second row is human wild type FIX (SEQ ID NO: 472). The third, fourth, and fifth rows are human wild-type FIX optimized for expression in human at a threshold of 0.5 (SEQ ID NO: 518), 0.8 (SEQ ID NO: 519), and 1.0 (SEQ ID NO: 520), respectively. The sixth row is human FIX with the replacement R338L (SEQ ID NO: 474). The seventh, eighth, and ninth rows are human FIX with the replacement R338L and optimized for expression in human at a threshold of 0.5 (SEQ ID NO: 524), 0.8 (SEQ ID NO: 525), and 1.0 (SEQ ID NO: 526), respectively. The tenth row is human modified FIX with the replacements R318Y/T343R/R338E (SEQ ID NO: 473). The eleventh, twelfth, and thirteenth rows are human modified FIX with the replacements R318Y/T343R/R338E and optimized for expression in human at a threshold of 0.5 (SEQ ID NO: 530), 0.8 (SEQ ID NO: 531), and 1.0 (SEQ ID NO: 532), respectively. Highlighted nucleotides in the mouse optimized and human optimized sequences designate differences between the two.

[0077] FIG. 10 depicts the vector map of the vector used to introduce the construct for encapsulation into the AAV capsid. The construct includes two ITRs, ApoE/C1 gene locus (enhancer), huSerpin A antitrypsin liver promoter (partial), Kozak sequence, Factor IX Signal Sequences, partial Factor IX intron I, Factor IX propeptide and mature polypeptide, and a bGH polyadenylation signal. The vector backbone contains an ampicillin resistance gene, CAP binding site, lac operon promoter, and ColE1/pMB1/pBR322/pUC origin of replication.

### DETAILED DESCRIPTION

Outline

| | |
|---|---|
| A. | Definitions |
| B. | Hemostasis and Role of Factor IX |

| | |
|---|---|
| 1. | Platelet Adhesion and Aggregation |
| 2. | Coagulation Cascade |

| | |
|---|---|
| a. | Initiation |
| b. | Amplification |
| c. | Propagation |

| | |
|---|---|
| 3. | Regulation of Coagulation |

| | |
|---|---|
| C. | Factor IX (FIX) Structure and Function |

| | |
|---|---|
| 1. | FIX Structure |
| 2. | FIX Post-Translational Modification |
| 3. | FIX Activation |
| 4. | FIX Function |
| 5. | FIX as a Biopharmaceutical |

| | |
|---|---|
| D. | AAV Gene Therapy Vectors and Constructs for Gene Therapy |
| E. | Modified FIX Polypeptides |

| | |
|---|---|
| 1. | Exemplary Amino Acid Replacements |

| | |
|---|---|
| a. | Altered Glycosylation |

| | |
|---|---|
| i. | Advantages of Glycosylation |
| ii. | Exemplary Modified FIX Polypeptides with Altered Glycosylation |

| | |
|---|---|
| b. | Increased Resistance to AT-III and Heparin |

| | |
|---|---|
| i. | AT-III |
| ii. | Heparin |
| iii. | Exemplary FIX Polypeptides with Increased Resistance to AT-III and Heparin |

| | |
|---|---|
| c. | Mutations to Increase Catalytic Activity |
| d. | Mutations to Decrease LRP Binding |
| e. | Other Mutations to Alter Post-Translational Modification |

| | |
|---|---|
| 2. | Combination Modifications |

| | |
|---|---|
| a. | Modifications to Increase Activity |
| b. | Modifications that Increase Affinity for Phospholipids or Reduce Binding to Collagen |
| c. | Additional Modifications to Increase Resistance to Inhibitors |
| d. | Additional Modifications to Alter Glycosylation |
| e. | Modifications to Increase Resistance to Proteases |
| f. | Modifications to Reduce Immunogenicity |
| g. | Exemplary Combination Modifications |

| | |
|---|---|
| 3. | Conjugates and Fusion Proteins |

| | |
|---|---|
| F. | Production of FIX Polypeptides |
| G. | Assessing Modified FIX Polypeptide Activities |

| | |
|---|---|
| 1. | In Vitro Assays |

| | |
|---|---|
| a. | Glycosylation |
| b. | Other Post-Translational Modifications |
| c. | Proteolytic Activity |
| d. | Coagulation Activity |
| e. | Binding to and/or Inhibition by Other Proteins and Molecules |
| f. | Phospholipid Affinity |

| | |
|---|---|
| 2. | Non-Human Animal Models |
| 3. | Clinical Assays |

| | |
|---|---|
| H. | Formulation and Administration |

| | |
|---|---|
| 1. | Formulations |
| 2. | Dosages |
| 3. | Administration of the Vectors Encoding Modified FIX Polypeptides |

| | |
|---|---|
| I. | Therapeutic Uses |

| | |
|---|---|
| 1. | Hemophilia |
| 2. | Pathophysiology |
| 3. | Clinical Characteristics |
| 4. | Hemophilia B |

| | |
|---|---|
| J. | Combination Therapies |
| K. | Examples |

### A. DEFINITIONS

[0079] Unless defined otherwise, all technical and scientific terms used herein have the same meaning as is commonly understood by one of skill in the art to which the invention(s) belong. All patents, patent applications, published applications and publications, GenBank sequences, databases, websites and other published materials referred to throughout the entire disclosure herein, unless noted otherwise, are incorporated by reference in their entirety. In the event that there are a plurality of definitions for terms herein, those in this section prevail. Where reference is made to a URL or other such identifier or address, it is understood that such identifiers can change and particular information on the internet can come and go, but equivalent information can be found by searching the internet. Reference thereto evidences the availability and public dissemination of such information.

[0080] As used herein, coagulation pathway or coagulation cascade refers to the series of activation events that leads to the formation of an insoluble fibrin clot. In the coagulation cascade or pathway, an inactive protein of a serine protease (also called a zymogen) is converted to an active protease by cleavage of one or more peptide bonds, which then serves as the activating protease for the next zymogen molecule in the cascade. In the final proteolytic step of the cascade, fibrinogen is proteolytically cleaved by thrombin to fibrin, which is then cross-linked at the site of injury to form a clot.

[0081] As used herein, “hemostasis” refers to the stopping of bleeding or blood flow in an organ or body part. The term hemostasis can encompass the entire process of blood clotting to prevent blood loss following blood vessel injury to subsequent dissolution of the blood clot following tissue repair.

[0082] As used herein, “clotting” or “coagulation” refers to the formation of an insoluble fibrin clot, or the process by which the coagulation factors of the blood interact in the coagulation cascade, ultimately resulting in the formation of an insoluble fibrin clot.

[0083] As used herein, a “protease” is an enzyme that catalyzes the hydrolysis of covalent peptidic bonds. These designations include zymogen forms and activated single-, two- and multiple-chain forms thereof. For clarity, reference to proteases refer to all forms. Proteases include, for example, serine proteases, cysteine proteases, aspartic proteases, threonine and metallo-proteases depending on the catalytic activity of their active site and mechanism of cleaving peptide bonds of a target substrate.

[0084] As used herein, serine proteases or serine endopeptidases refers to a class of peptidases, which are characterized by the presence of a serine residue in the active site of the enzyme. Serine proteases participate in a wide range of functions in the body, including blood clotting and inflammation, as well as functioning as digestive enzymes in prokaryotes and eukaryotes. The mechanism of cleavage by serine proteases is based on nucleophilic attack of a targeted peptidic bond by a serine. Cysteine, threonine or water molecules associated with aspartate or metals also can play this role. Aligned side chains of serine, histidine and aspartate form a catalytic triad common to most serine proteases. The active site of serine proteases is shaped as a cleft where the polypeptide substrate binds.

[0085] As used herein, a “factor IX” or FIX polypeptide refers to any factor IX polypeptide including, but not limited to, a recombinantly produced polypeptide, a synthetically produced polypeptide and a factor IX polypeptide extracted or isolated from cells or tissues including, but not limited to, liver and blood. Alternative names that are used interchangeably for factor IX include Factor 9, Christmas factor, plasma thromboplastin component (PTC), coagulation factor IX, and serum factor IX. Abbreviations for factor IX include FIX and F9. Factor IX includes related polypeptides from different species including, but not limited to animals of human and non-human origin. Human factor IX (hFIX) includes factor IX, allelic variant isoforms (such as the allelic variant having a T148A (SEQ ID NO: 20 or 325) or T412P mutation), synthetic molecules from nucleic acids, protein isolated from human tissue and cells, and modified forms thereof. Exemplary unmodified mature human factor IX polypeptides include, but are not limited to, unmodified and wild-type native factor IX polypeptides (such as the polypeptide containing a sequence set forth in SEQ ID NO:3) and the unmodified and wild-type precursor factor IX polypeptide that includes a propeptide (Pro) and/or a signal peptide (such as, the precursor FIX polypeptide that has the sequence set forth in SEQ ID NO:2). One of skill in the art would recognize that the referenced positions of the mature factor IX polypeptide (SEQ ID NO:3) differ by 46 amino acid residues when compared to the precursor FIX polypeptide SEQ ID NO:2, which is the factor IX polypeptide containing the signal peptide and propeptide sequences. Thus, the first amino acid residue of SEQ ID NO:3 “corresponds to” the forty-seventh (47^{th}) amino acid residue of SEQ ID NO:2.

[0086] The term “factor IX” also encompasses the activated form of the factor IX polypeptide, called factor IXa (FIXa), containing the FIX light chain (corresponding to amino acids 47-191 of SEQ ID NO:2, and amino acids 1-145 of SEQ ID NO:3) and FIX heavy chain (corresponding to amino acids 227-461 of SEQ ID NO:2, and amino acids 181-415 of SEQ ID NO:3) linked by a disulfide bond between residues 132C and 289C (corresponding to the mature FIX polypeptide set forth in SEQ ID NO:3). FIXa is produced from a mature FIX polypeptide (e.g., that set forth in SEQ ID NO:3) by proteolytic cleavage after amino acid residues R145 and R180. Proteolytic cleavage can be carried out, for example, by activated factor XI (FXIa) or the tissue factor/activated factor VII (TF/FVIIa) complex. The FIX polypeptides provided herein can be further modified, such as by chemical modification or post-translational modification. Such modifications include, but are not limited to, glycosylation, PEGylation, albumination, farnesylation, carboxylation, hydroxylation, phosphorylation, and other polypeptide modifications known in the art.

[0087] Factor IX includes factor IX from any species, including human and non-human species. FIX polypeptides of non-human origin include, but are not limited to, murine, canine, feline, leporine, avian, bovine, ovine, porcine, equine, piscine, ranine, and other primate factor IX polypeptides. Exemplary FIX polypeptides of non-human origin include, for example, chimpanzee (Pan troglodytes, SEQ ID NO:4), rhesus macaque (Macaca mulatta, SEQ ID NO:5), mouse (Mus musculus, SEQ ID NO:6), rat (Rattus norvegicus, SEQ ID NO:7), Guinea pig (Cavia porcellus, SEQ ID NO:8), pig (Sus scrofa, SEQ ID NO:9), dog (Canis familiaris, SEQ ID NO:10), cat (Felis catus, SEQ ID NO:11), rabbit (Oryctolagus cuniculus, SEQ ID NO:12), chicken (Gallus gallus, SEQ ID NO:13), cow (Bos Taurus, SEQ ID NO:14), sheep (Ovis aries, SEQ ID NO:15), frog (Xenopus tropicalis, SEQ ID NO:16), zebrafish (Danio rerio, SEQ ID NO:17), and Japanese pufferfish (Takifugu rubripes, SEQ ID NO:18).

[0088] Reference to FIX polypeptides also includes precursor polypeptides and mature FIX polypeptides in single-chain or two-chain forms, truncated forms thereof that have activity, and includes allelic variants and species variants, variants encoded by splice variants, and other variants, including polypeptides that have at least 40%, 45%, 50%, 55%, 65%, 70%, 75%, 80%, 85%, 90%, 95%, 96%, 97%, 98%, 99% or more sequence identity to the precursor polypeptide set forth in SEQ ID NO:2 or the mature form thereof (SEQ ID NO:3). Included are modified FIX polypeptides, such as those of SEQ ID NOs: 75-272 and 326-417, and variants thereof. Also included are those that retain at least an activity of a FIX, such as FVIIIa binding, Factor X binding, phospholipid binding, and/or coagulant activity of a FIX polypeptide. By retaining activity, the activity can be altered, such as reduced or increased, as compared to a wild-type FIX so long as the level of activity retained is sufficient to yield a detectable effect. FIX polypeptides include, but are not limited to, tissue-specific isoforms and allelic variants thereof, synthetic molecules prepared by translation of nucleic acids, proteins generated by chemical synthesis, such as syntheses that include ligation of shorter polypeptides, through recombinant methods, proteins isolated from human and non-human tissue and cells, chimeric FIX polypeptides and modified forms thereof. FIX polypeptides also include fragments or portions of FIX that are of sufficient length or include appropriate regions to retain at least one activity (upon activation if needed) of a full-length mature polypeptide. FIX polypeptides also include those that contain chemical or posttranslational modifications and those that do not contain chemical or posttranslational modifications. Such modifications include, but are not limited to, PEGylation, albumination, glycosylation, farnesylation, carboxylation, hydroxylation, phosphorylation, multimerization conjugation (i.e., Fc domain) and other polypeptide modifications known in the art.

[0089] As used herein, “corresponding residues” refers to residues that occur at aligned loci. Related or variant polypeptides are aligned by any method known to those of skill in the art. Such methods typically maximize matches, and include methods such as using manual alignments and by using the numerous alignment programs available (for example, BLASTP) and others known to those of skill in the art. By aligning the sequences of polypeptides, one skilled in the art can identify corresponding residues, using conserved and identical amino acid residues as guides. For example, by aligning the sequences of Factor IX polypeptides, one of skill in the art can identify corresponding residues, using conserved and identical amino acid residues as guides. For example, the tyrosine in amino acid position 1 (Y1) of SEQ ID NO:3 (mature factor IX) corresponds to the tyrosine in amino acid position 47 (Y47) of SEQ ID NO:2. In other instances, corresponding regions can be identified. For example, the Gla domain corresponds to amino acid positions Y1 through V46 of SEQ ID NO:3, and to amino acid positions Y47 through V92 of SEQ ID NO:2. One skilled in the art also can employ conserved amino acid residues as guides to find corresponding amino acid residues between and among human and non-human sequences. For example, amino acid residues Q11 and P74 of SEQ ID NO:3 (human) correspond to R11 and Q74 of SEQ ID NO:14 (bovine). Corresponding positions also can be based on structural alignments, for example by using computer simulated alignments of protein structure. In other instances, corresponding regions can be identified.

[0090] As used herein, the same, with reference to an amino acid replacement, refers to the identical replacement at the reference amino acid position in SEQ ID NO:3 in a corresponding position in another Factor IX polypeptide. For example, the same replacement with reference to the replacement of tyrosine at amino acid residue R318 in SEQ ID NO:3 is the replacement of tyrosine at amino acid residue R319 in SEQ ID NO:20 (see, for example, FIG. 3D). For example, the same replacement with reference to the replacement of asparagine at amino acid residue E410 in SEQ ID NO:3 is the replacement of asparagine at amino acid residue 5410 in SEQ ID NO:366. It is understood that reference to replacement of the same amino acid refers to replacement of amino acid residues that differ at the corresponding position from the replaced residue.

[0091] As used herein, a “proregion,” “propeptide,” or “pro sequence,” refers to a region or a segment that is cleaved to produce a mature protein. This can include segments that function to suppress proteolytic activity by masking the catalytic machinery and thus preventing formation of the catalytic intermediate (i.e., by sterically occluding the substrate binding site). A proregion is a sequence of amino acids positioned at the amino terminus of a mature biologically active polypeptide and can be as little as a few amino acids or can be a multi-domain structure.

[0092] As used herein, “mature factor IX” refers to a FIX polypeptide that lacks a signal sequence and a propeptide sequence. Typically, a signal sequence targets a protein for secretion via the endoplasmic reticulum (ER)-golgi pathway and is cleaved following insertion into the ER during translation. A propeptide sequence typically functions in post-translational modification of the protein and is cleaved prior to secretion of the protein from the cell. Thus, a mature FIX polypeptide is typically a secreted protein. In one example, a mature human FIX polypeptide is set forth in SEQ ID NO:3. The amino acid sequence set forth in SEQ ID NO:3 differs from that of the precursor polypeptide set forth in SEQ ID NO:2 in that SEQ ID NO:3 is lacking the signal sequence, which corresponds to amino acid residues 1-28 of SEQ ID NO:2, and also lacks the propeptide sequence, which corresponds to amino acid residues 29-46 of SEQ ID NO:2. Reference to a mature FIX polypeptide encompasses the single-chain zymogen form and the two-chain form. Thus, reference to a mature FIX polypeptide also refers to the two chain form containing the heavy chain and light chain (without the activation peptide corresponding to amino acids 192-226 of SEQ ID NO:2) joined by disulfide bonds.

[0093] As used herein, “wild-type” or “native” with reference to FIX refers to a FIX polypeptide encoded by a native or naturally occurring FIX gene, including allelic variants, that is present in an organism, including a human and other animals, in nature. Reference to wild-type factor IX without reference to a species is intended to encompass any species of a wild-type factor IX. Included among wild-type FIX polypeptides are the encoded precursor polypeptide, fragments thereof, and processed forms thereof, such as a mature form lacking the signal peptide as well as any pre- or post-translationally processed or modified forms thereof. Also included among native FIX polypeptides are those that are post-translationally modified, including, but not limited to, modification by glycosylation, carboxylation and hydroxylation. Native FIX polypeptides also include single-chain and two-chain forms. For example, humans express native FIX. The amino acid sequence of exemplary wild-type human FIX are set forth in SEQ ID NOS: 2 and 3, and allelic variants thereof. Other animals produce native FIX, including, but not limited to, chimpanzee (Pan troglodytes, SEQ ID NO:4), rhesus macaque (Macaca mulatta, SEQ ID NO:5), mouse (Mus musculus, SEQ ID NO:6), rat (Rattus norvegicus, SEQ ID NO:7), Guinea pig (Cavia porcellus, SEQ ID NO:8), pig (Sus scrofa, SEQ ID NO:9), dog (Canis familiaris, SEQ ID NO:10), cat (Felis catus, SEQ ID NO:11), rabbit (Oryctolagus cuniculus, SEQ ID NO:12), chicken (Gallus gallus, SEQ ID NO:13), cow (Bos Taurus, SEQ ID NO:14), sheep (Ovis aries, SEQ ID NO:15), frog (Xenopus tropicalis, SEQ ID NO:16), zebrafish (Danio rerio, SEQ ID NO:17), and Japanese pufferfish (Takifugu rubripes, SEQ ID NO:18).

[0094] As used herein, species variants refer to variants in polypeptides among different species, including different mammalian species, such as mouse and human.

[0095] As used herein, allelic variants refer to variations in proteins among members of the same species.

[0096] As used herein, a splice variant refers to a variant produced by differential processing of a primary transcript of genomic DNA that results in more than one type of mRNA.

[0097] As used herein, a zymogen refers to a protease that is activated by proteolytic cleavage, including maturation cleavage, such as activation cleavage, and/or complex formation with other protein(s) and/or cofactor(s). A zymogen is an inactive precursor of a proteolytic enzyme. Such precursors are generally larger, although not necessarily larger, than the active form. With reference to serine proteases, zymogens are converted to active enzymes by specific cleavage, including catalytic and autocatalytic cleavage, or by binding of an activating co-factor, which generates an active enzyme. For example, generally, zymogens are present in a single-chain form. Zymogens, generally, are inactive and can be converted to mature active polypeptides by catalytic or autocatalytic cleavage at one or more proteolytic sites to generate a multi-chain, such as a two-chain, polypeptide. A zymogen, thus, is an enzymatically inactive protein that is converted to a proteolytic enzyme by the action of an activator. Cleavage can be effected by auto activation. A number of coagulation proteins are zymogens; they are inactive, but become cleaved and activated upon the initiation of the coagulation system following vascular damage. With reference to FIX, the FIX polypeptides exist in the blood plasma as zymogens until cleavage by proteases, such as for example, activated FXI (FXIa) or FVIIa (in association with TF) to produce the two-chain form of FIX (FIXa).

[0098] As used herein, a capsid that transduces hepatocytes at a high level is one that transduces hepatocytes at a level at least as high as AAV8 capsid or an AAV with the DJ/8 (SEQ ID NO:427) capsid. In some embodiments, the capsid also transduces human and mouse hepatocytes at comparable or similar levels. Exemplary of these capsids are those designed KP1, KP2, and KP3 (SEQ ID NOs: 418-423).

[0099] As used herein, an activation sequence refers to a sequence of amino acids in a zymogen that is the site required for activation cleavage or maturation cleavage to form an active protease. Cleavage of an activation sequence can be catalyzed autocatalytically or by activating partners.

[0100] As used herein, activation cleavage is a type of maturation cleavage, which induces a conformation change that is required for the development of full enzymatic activity. This is a classical activation pathway, for example, for serine proteases in which a cleavage generates a new N-terminus that interacts with the conserved regions of the protease, such as Asp194 in chymotrypsin, to induce conformational changes required for activity. Activation can result in production of multi-chain forms of the proteases. In some instances, single chain forms of the protease can exhibit proteolytic activity.

[0101] As used herein, “activated Factor IX” or “FIXa” refers to any two-chain form of a FIXa polypeptide. A two-chain form typically results from proteolytic cleavage, but can be produced synthetically. Activated Factor IX, thus, includes the zymogen-like two-chain form with low coagulant activity, a fully activated form that occurs upon binding to FVIIIa and FX, and mutated forms that exist in a fully activated two-chain form or undergo conformational change to a fully activated form. For example, a single-chain form of FIX polypeptide (see, e.g., SEQ ID NO:3) is proteolytically cleaved after amino acid residues R145 and R180 of the mature FIX polypeptide. The cleavage products, FIX heavy chain and FIX light chain, which are held together by a disulfide bond (between amino acid residues 132C and 289C in the FIX of SEQ ID NO:3), form the two-chain activated FIX enzyme. Proteolytic cleavage can be carried out, for example, by activated Factor XIa (FXIa), and activated Factor VIIa (FVIIa) in complex with TF.

[0102] As used herein, a “property” of a FIX polypeptide refers to a physical or structural property, such three-dimensional structure, pI, half-life, conformation and other such physical characteristics.

[0103] As used herein, an “activity” of a FIX polypeptide refers to any activity exhibited by a factor IX polypeptide. Such activities can be tested in vitro and/or in vivo and include, but are not limited to, coagulation or coagulant activity, pro-coagulant activity, proteolytic or catalytic activity such as to effect factor X (FX) activation; antigenicity (ability to bind to or compete with a polypeptide for binding to an anti-FIX antibody); ability to bind factor VIIIa or factor X; and/or ability to bind to phospholipids. Activity can be assessed in vitro or in vivo using recognized assays, for example, by measuring coagulation in vitro or in vivo. The results of such assays indicate that a polypeptide exhibits an activity that can be correlated to activity of the polypeptide in vivo, in which in vivo activity can be referred to as biological activity. Assays to determine functionality or activity of modified forms of FIX are known to those of skill in the art. Exemplary assays to assess the activity of a FIX polypeptide include prothromboplastin time (PT) assay or the activated partial thromboplastin time (aPTT) assay to assess coagulant activity, or chromogenic assays using synthetic substrates to assess catalytic or proteolytic activity.

[0104] As used herein, “exhibits at least one activity” or “retains at least one activity” refers to the activity exhibited by a modified FIX polypeptide as compared to an unmodified FIX polypeptide of the same form and under the same conditions. For example, a modified FIX polypeptide in a two-chain form is compared with an unmodified FIX polypeptide in a two-chain form, under the same experimental conditions, where the only difference between the two polypeptides is the modification under study. In another example, a modified FIX polypeptide in a single-chain form is compared with an unmodified FIX polypeptide in a single-chain form, under the same experimental conditions, where the only difference between the two polypeptides is the modification under study. Typically, a modified FIX polypeptide that retains or exhibits at least one activity of an unmodified FIX polypeptide of the same form retains a sufficient amount of the activity such that, when administered in vivo, the modified FIX polypeptide is therapeutically effective as a procoagulant therapeutic. Generally, for a modified FIX polypeptide to retain therapeutic efficacy as a procoagulant, the amount of activity that is retained is or is about 0.5%, 1%, 2%, 3%, 4%, 5%, 6%, 7%, 8%, 9%, 10%, 11%, 12%, 13%, 14%, 15%, 16%, 17%, 18%, 19%, 20%, 30%, 40%, 50%, 60%, 70%, 80%, 90%, 100%, 200%, 300%, 400%, 500%, or more, of the activity of an unmodified FIX polypeptide of the same form that displays therapeutic efficacy as a procoagulant. The amount of activity that is required to maintain therapeutic efficacy as a procoagulant can be empirically determined, if necessary. Typically, retention of 0.5% to 20%, 0.5% to 10%, or 0.5% to 5% of an activity is sufficient to retain therapeutic efficacy as a procoagulant in vivo.

[0105] It is understood that the activity being exhibited or retained by a modified FIX polypeptide can be any activity, including, but not limited to, coagulation or coagulant activity; pro-coagulant activity; proteolytic or catalytic activity such as to effect factor X (FX) activation; antigenicity (ability to bind to or compete with a polypeptide for binding to an anti-FIX antibody); ability to bind Factor VIIIa or Factor X; and/or ability to bind to phospholipids. In some instances, a modified FIX polypeptide can retain an activity that is increased compared to an unmodified FIX polypeptide. In some cases, a modified FIX polypeptide can retain an activity that is decreased compared to an unmodified FIX polypeptide. Activity of a modified FIX polypeptide can be any level of percentage of activity of the unmodified polypeptide, where both polypeptides are in the same form, including but not limited to, 1% of the activity, 2%, 3%, 4%, 5%, 10%, 20%, 30%, 40%, 50%, 60%, 70%, 80%, 90%, 95%, 96%, 97%, 98%, 99%, 100%, 200%, 300%, 400%, 500%, or more, activity compared to the polypeptide that does not contain the modification at issue. For example, a modified FIX polypeptide can exhibit increased or decreased activity compared to the unmodified FIX polypeptide in the same form. For example, it can retain at least about or 1%, 2%, 3%, 4%, 5%, 6%, 7%, 8%, 9%, 10%, 20%, 30%, 40%, 50%, 60%, 70%, 80%, 90%, 95%, 96%, 97%, 98%, or at least 99%, of the activity of the unmodified FIX polypeptide. In other embodiments, the change in activity is at least about 2 times, 3 times, 4 times, 5 times, 6 times, 7 times, 8 times, 9 times, 10 times, 20 times, 30 times, 40 times, 50 times, 60 times, 70 times, 80 times, 90 times, 100 times, 200 times, 300 times, 400 times, 500 times, 600 times, 700 times, 800 times, 900 times, 1000 times, or more times, greater than unmodified FIX. The particular level to be retained is a function of the intended use of the polypeptide and can be empirically determined. Activity can be measured, for example, using in vitro or in vivo assays, such as those described herein.

[0106] As used herein, “coagulation activity” or “coagulant activity” or “pro-coagulant activity” refers to the ability of a polypeptide to effect coagulation. Assays to assess coagulant activity are known to those of skill in the art, and include prothrombin time (PT) assay or the activated partial thromboplastin time (aPTT) assay.

[0107] As used herein, the partial thromboplastin time (PTT) or activated partial thromboplastin time (aPTT or APTT) is a medical test that characterizes blood coagulation. Partial thromboplastin time (PTT) measures the overall speed at which blood clots by means of two consecutive series of biochemical reactions known as the “intrinsic” (also referred to as the contact activation pathway) and common coagulation pathways. The partial thromboplastin time (PTT) can be used with another measure of how quickly blood clotting takes place called the prothrombin time (PT), which measures the speed of clotting by means of the extrinsic pathway (also known as the tissue factor pathway). Normal PTT times require the presence of the coagulation Factors: I, II, V, VIII, IX, X, XI and XII. Deficiencies in factors VII or XIII are detected with the PTT test. This assay is exemplified in the Examples.

[0108] As used herein, “catalytic activity” or “proteolytic activity” with reference to FIX refers to the ability of a FIX protein to catalyze the proteolytic cleavage of a substrate, and are used interchangeably. Assays to assess such activities are known in the art. For example, the proteolytic activity of FIX can be measured using chromogenic substrates such as Mes-D-CHD-Gly-Arg-AMC, where cleavage of the substrate is monitored by absorbance and the rate of substrate hydrolysis determined by linear regression.

[0109] As used herein, domain (typically a sequence of three or more, generally 5 or 7 or more amino acids) refers to a portion of a molecule, such as proteins or the encoding nucleic acids, that is structurally and/or functionally distinct from other portions of the molecule and is identifiable. For example, domains include those portions of a polypeptide chain that can form an independently folded structure within a protein made up of one or more structural motifs and/or that is recognized by virtue of a functional activity, such as proteolytic activity. A protein can have one, or more than one, distinct domains. For example, a domain can be identified, defined or distinguished by homology of the sequence therein to related family members, such as homology to motifs that define a protease domain or a Gla domain. In another example, a domain can be distinguished by its function, such as by proteolytic activity, or an ability to interact with a biomolecule, such as DNA binding, ligand binding, and dimerization. A domain independently can exhibit a biological function or activity such that the domain independently or fused to another molecule can perform an activity, such as, for example proteolytic activity or ligand binding. A domain can be a linear sequence of amino acids or a non-linear sequence of amino acids. Many polypeptides contain a plurality of domains. Such domains are known, and can be identified by those of skill in the art. For exemplification herein, definitions are provided, but it is understood that it is well within the skill in the art to recognize particular domains by name. If needed appropriate software can be employed to identify domains.

[0110] As used herein, a protease domain is the catalytically active portion of a protease. Reference to a protease domain of a protease includes the single, two- and multi-chain forms of any of these proteins. A protease domain of a protein contains all of the requisite properties of that protein required for its proteolytic activity, such as for example, the catalytic center. In reference to FIX, the protease domain shares homology and structural feature with the chymotrypsin/trypsin family protease domains, including the catalytic triad. For example, in the mature FIX polypeptide set forth in SEQ ID NO:3, the protease domain corresponds to amino acid positions 181 to 412.

[0111] As used herein, a gamma-carboxyglutamate (Gla) domain refers to the portion of a protein, for example a vitamin K-dependent protein, that contains post-translational modifications of glutamate residues, generally most, but not all of the glutamate residues, by vitamin K-dependent carboxylation to form Gla. The Gla domain is responsible for the high-affinity binding of calcium ions and binding to negatively-charged phospholipids. Typically, the Gla domain starts at the N-terminal extremity of the mature form of vitamin K-dependent proteins and ends with a conserved aromatic residue. In a mature FIX polypeptide the Gla domain corresponds to amino acid positions 1 to 46 of the exemplary polypeptide set forth in SEQ ID NO:3. Gla domains are well known and their locus can be identified in particular polypeptides. The Gla domains of the various vitamin K-dependent proteins share sequence, structural and functional homology, including the clustering of N-terminal hydrophobic residues into a hydrophobic patch that mediates interaction with negatively charged phospholipids on the cell surface membrane. Exemplary other Gla-containing polypeptides include, but are not limited to, FVII, FX, prothrombin, protein C, protein S, osteocalcin, matrix Gla protein, Growth-arrest-specific protein 6 (Gash), and protein Z.

[0112] As used herein, an epidermal growth factor (EGF) domain (EGF-1 or EGF-2) refers to the portion of a protein that shares sequence homology to a specific 30 to 40 amino acid portion of the epidermal growth factor (EGF) sequence. The EGF domain includes six cysteine residues that have been shown (in EGF) to be involved in disulfide bonds. The main structure of an EGF domain is a two-stranded beta-sheet followed by a loop to a C-terminal short two-stranded sheet. FIX contains two EGF domains: EGF-1 and EGF-2. These domains correspond to amino acid positions 47-83, and 84-125, respectively, of the mature FIX polypeptide set forth in SEQ ID NO:3.

[0113] As used herein, “unmodified polypeptide” or “unmodified FIX” and grammatical variations thereof refer to a starting polypeptide that is selected for modification as provided herein. The starting polypeptide can be a naturally-occurring, wild-type form of a polypeptide. In addition, the starting polypeptide can be altered or mutated, such that it differs from a native wild type isoform but is nonetheless referred to herein as a starting unmodified polypeptide relative to the subsequently modified polypeptides produced herein. Thus, existing proteins known in the art that have been modified to have a desired increase or decrease in a particular activity or property compared to an unmodified reference protein can be selected and used as the starting unmodified polypeptide. For example, a protein that has been modified from its native form by one or more single amino acid changes and possesses either an increase or decrease in a desired property, such as a change in an amino acid residue or residues to alter glycosylation, can be a target protein, referred to herein as unmodified, for further modification of either the same or a different property. Exemplary modified FIX polypeptides known in the art include any FIX polypeptide described in, for example, Schuettrumpf et al., (2005) Blood 105(6):2316-23; Melton et al., (2001) Blood Coagul. Fibrinolysis 12(4):237-43; Cheung et al., (1992) J. Biol. Chem. 267:20529-20531; Cheung et al., (1996) Proc. Natl. Acad. Sci. U.S.A. 93:11068-11073; Hopfner et al., (1997) EMBO J. 16:6626-6635; Sichler et al., (2003) J. Biol. Chem. 278:4121-4126; Begbie et al., (2005) J. Thromb. Haemost. 94(6):1138-47; Chang, J. et al., (1998) J. Biol. Chem. 273(20):12089-94; Yang, L. et al., (2002) J. Biol. Chem. 277(52):50756-60; Yang, L. et al., (2003) J. Biol. Chem. 278(27):25032-8; U.S. Pat. Nos. 5,969,040, 5,621,039, 6,423,826, 7,125,841, 6,017,882, 6,531,298; U.S. Patent Publication Nos. 2003/0211094, 2007/0254840, 2008/0188414, 2008/000422, 2008/0050772, 2008/0146494, 2008/0050772, 2008/0187955, 2004/0254106, 2005/0147618, 2008/0280818, 2008/0102115, 2008/0167219 and 2008/0214461; and International patent Application Publication Nos. WO 2007/112005, WO 2007/135182, WO 2008/082613, WO 2008/119815, WO 2008/119815, WO 2007/149406, WO 2007/112005 and WO 2004/101740.

[0114] As used herein, “modified factor IX polypeptides” and “modified factor IX” refer to a FIX polypeptide that has one or more amino acid differences compared to an unmodified factor IX polypeptide. The one or more amino acid differences can be amino acid mutations, such as one or more amino acid replacements (substitutions), insertions or deletions, or can be insertions or deletions of entire domains, and any combinations thereof. Typically, a modified FIX polypeptide has one or more modifications in the primary sequence compared to an unmodified FIX polypeptide. For example, a modified FIX polypeptide provided herein can have 1, 2, 3, 4, 5, 6, 7, 8, 9, 10, 11, 12, 13, 14, 15, 16, 17, 18, 19, 20, 30, 40, 50 or more amino acid differences compared to an unmodified FIX polypeptide. Any modification is contemplated as long as the resulting polypeptide exhibits at least one FIX activity associated with a native FIX polypeptide, such as, for example, catalytic activity, proteolytic activity, the ability to bind FVIIIa or the ability to bind phospholipids.

[0115] As used herein, “antithrombin III” or “AT-III” is a serine protease inhibitor (serpin). AT-III is synthesized as a precursor protein containing 464 amino acid residues (SEQ ID NO:21) that is cleaved during secretion to release a 432 amino acid mature antithrombin (SEQ ID NO:22).

[0116] As used herein, “heparin” refers to a heterogeneous group of straight-chain highly sulfated glycosaminoglycans having anticoagulant properties. Heparin can bind to AT-III to form the AT-III/heparin complex.

[0117] As used herein, “increased resistance to AT-III and/or heparin” refers to any amount of decreased sensitivity of a polypeptide, such as a modified FIX polypeptide, to the inhibitory effects of AT-III alone, heparin alone and/or the AT-III/heparin complex compared with a reference polypeptide, such as an unmodified FIX polypeptide. Increased resistance to AT-III, heparin, and/or an AT-III/heparin complex can be assayed by assessing the binding of a modified FIX polypeptide to AT-III, heparin, and/or an AT-III complex. Increased resistance also can be assayed by measuring inhibition of the catalytic or coagulant activity of a FIX polypeptide in the presence of AT-III, heparin, or an AT-III/heparin complex. Assays to determine the binding of a polypeptide to an inhibitor or the inhibition of enzymatic activity of a polypeptide by an inhibitor are known in the art. For covalent inhibitors, such as, for example, AT-III or an AT-III/heparin complex, a second order rate constant for inhibition can be measured. For non-covalent inhibitors, such as, for example, heparin, a kᵢ can be measured. In addition, surface plasma resonance, such as on a BIAcore biosensor instrument, also can be used to measure the binding of FIX polypeptides to AT-III, heparin, and/or an AT-III/heparin complex using one or more defined conditions. For covalent inhibitors such as AT-III or an AT-III/heparin complex, only an on-rate can be measured using BIAcore; for non-covalent inhibitors such as heparin, both the on-rate and off-rate can be measured. Assays to determine the inhibitory effect of, for example, AT-III/heparin on FIX coagulant activity also are known in the art. For example, the ability of a modified FIX polypeptide to cleave its substrate FX in the presence or absence of AT-III/heparin can be measured, and the degree to which AT-III/heparin inhibits the reaction determined. This can be compared to the ability of an unmodified FIX polypeptide to cleave its substrate FX in the presence or absence of AT-III. Alternatively, the second order rate constant for inhibition of a FIX polypeptide can be measured and compared to the second order rate constant for inhibition of an unmodified FIX polypeptide. When comparing second order rate constants for inhibition, increased resistance to inhibition means a decreased second order rate constant of inhibition. A modified polypeptide that exhibits increased resistance to AT-III and/or heparin exhibits, for example, an increase of 1%, 2%, 3%, 4%, 5%, 6%, 7%, 8%, 9%, 10%, 20%, 30%, 40%, 50%, 60%, 70%, 80%, 90%, 91%, 92%, 93%, 94%, 95%, 96%, 97%, 98%, 99%, 100%, 200%, 300%, 400%, 500%, or more resistance to the effects of AT-III, heparin, and/or an AT-III/heparin complex, respectively, compared to an unmodified polypeptide.

[0118] As used herein, cofactors refer to proteins or molecules that bind to other specific proteins or molecules to form an active complex. In some examples, binding to a cofactor is required for optimal proteolytic activity. For example, FVIIIa is a cofactor of FIXa. Binding of FVIIIa to FIXa induces conformational changes that result in increased proteolytic activity of FIXa for its substrate, FX.

[0119] As used herein, a glycosylation site refers to an amino position in a polypeptide to which a carbohydrate moiety can be attached. Typically, a glycosylated protein contains one or more amino acid residues, such as asparagine or serine, for the attachment of the carbohydrate moieties.

[0120] As used herein, a native glycosylation site refers to the position of an amino acid to which a carbohydrate moiety is attached in a wild-type polypeptide. There are six native glycosylation sites in FIX; two N-glycosylation sites at N157 and N167, and six O-glycosylation sites at S53, S61, T159, T169, T172 and T179, corresponding to amino acid positions in the mature FIX polypeptide set forth in SEQ ID NO:3.

[0121] As used herein, a non-native glycosylation site refers to the position of an amino acid to which a carbohydrate moiety is attached in a modified polypeptide that is not present in a wild-type polypeptide. Non-native glycosylation sites can be introduced into a FIX polypeptide by amino acid replacement. O-glycosylation sites can be created, for example, by amino acid replacement of a native residue with a serine or threonine. N-glycosylation sites can be created, for example, by establishing the motif Asn-Xaa-Ser/Thr/Cys, where Xaa is not proline. Creation of this consensus sequence by amino acid modification can involve, for example, a single amino acid replacement of a native amino acid residue with an asparagine, a single amino acid replacement of a native amino acid residue with a serine, threonine or cysteine, or a double amino acid replacement involving a first amino acid replacement of a native residue with an asparagine and a second amino acid replacement of native residue with a serine, threonine or cysteine.

[0122] As used herein, “increased levels of glycosylation” and any grammatical variations thereof, refers to an increased amount of carbohydrate linked to a polypeptide as compared with a reference polypeptide or protein. The carbohydrate can be N-linked, O-linked, C-linked or be attached by any other linkage. The level of glycosylation can be increased by at least about 1%, 2%, 3%, 4%, 5%, 6%, 7%, 8%, 9%, 10%, 20%, 30%, 40%, 50%, 60%, 70%, 80%, 90%, 100%, 200%, 300%, 400%, 500%, or more compared to the level of glycosylation of an unmodified polypeptide. Assays to determine the level of glycosylation (i.e. amount of carbohydrate) of a polypeptide are known in the art. For example, the carbohydrate content or level of glycosylation can be assessed by high pH anion exchange chromatography, fluorophore assisted carbohydrate electrophoresis (FACE), sequential exoglycosidase digestions, mass spectrometry, NMR, gel electrophoresis, or any other method described herein or known in the art.

[0123] As used herein, “biological activity” refers to the in vivo activities of a compound or physiological responses that result upon in vivo administration of a compound, composition or other mixture. Biological activity, thus, encompasses therapeutic effects and pharmaceutical activity of such compounds, compositions and mixtures. Biological activities can be observed in in vitro systems designed to test or use such activities. Thus, for purposes herein a biological activity of a FIX polypeptide encompasses the coagulant activity.

[0124] As used herein, a pharmacokinetic property refers to a property related to the action of a drug or agent, such as a FIX polypeptide, in the body and in particular the rate at which drugs are absorbed, distributed, metabolized, and eliminated by the body. Pharmacokinetics can be assessed by various parameters. These include, but are not limited to, clearance, volume of distribution, in vivo recovery, total modified FIX polypeptide exposure in vivo, serum half-life, and mean resonance time (MRT). Pharmacokinetic properties of polypeptide can be assessed using methods well known in the art, such as, for example, administering the polypeptide to a human or animal model and assessing the amount of FIX in the body at various time points. The various parameters, such as clearance, volume of distribution, in vivo recovery, total modified FIX polypeptide exposure in vivo, serum half-life, and mean resonance time (MRT), are assessed using calculations well known in the art and described herein.

[0125] As used herein, “improved pharmacokinetic properties” refers to a desirable change in a pharmacokinetic property of a polypeptide, such as a modified FIX polypeptide, compared to, for example, an unmodified FIX polypeptide. The change can be an increase or a decrease.

[0126] As used herein, clearance refers to the removal of an agent, such as a polypeptide, from the body of a subject following administration. Clearance can be assessed using methods well known in the art, such as those described in Example 6. For example, assays in which a FIX polypeptide is administered to mice can be performed, and the clearance of the polypeptide from the body assessed by measuring the amount of FIX in the plasma at various time points and calculating the clearance as Dose/AUC_{0-inf}. Improved clearance of a modified FIX polypeptide compared to an unmodified FIX polypeptide refers to a decrease in clearance of a modified FIX polypeptide compared to an unmodified FIX polypeptide. The clearance of a modified FIX polypeptide can be decreased by at least or about 1%, 2%, 3%, 4%, 5%, 6%, 7%, 8%, 9%, 10%, 20%, 30%, 40%, 50%, 60%, 70%, 80%, 90%, 91%, 92%, 93%, 94%, 95%, 96%, 97%, 98%, or 99%, compared to an unmodified FIX polypeptide.

[0127] As used herein, mean resonance time (MRT) refers to the amount of time a FIX polypeptide resides in the body following administration. MRT can be assessed using methods well known in the art, such as those described in Example 6. For example, assays in which a FIX polypeptide is administered to mice can be performed, and the MRT of the polypeptide assessed by measuring the amount of FIX in the plasma at various time points and calculating the MRT as AUMC₀₋ₗₐₛₜ/AUC₀₋ₗₐₛₜ, where AUC₀₋ₗₐₛₜ is total area under the curve and AUMC₀₋ₗₐₛₜ is the total area under the first moment-versus-time curve. Improved MRT of a modified FIX polypeptide compared to an unmodified FIX polypeptide refers to an increase in MRT of a modified FIX polypeptide compared to an unmodified FIX polypeptide. The MRT of a modified FIX polypeptide can be increased by at least or about 1%, 2%, 3%, 4%, 5%, 6%, 7%, 8%, 9%, 10%, 20%, 30%, 40%, 50%, 60%, 70%, 80%, 90%, 91%, 92%, 93%, 94%, 95%, 96%, 97%, 98%, 99%, 100%, 200%, 300%, 400%, 500% or more compared to an unmodified FIX polypeptide.

[0128] As used herein, in vivo recovery refers to the percentage of FIX polypeptide detectable in the circulation after a period of time following administration in relation to the total amount of FIX polypeptide administered. In vivo recovery can be assessed using methods well known in the art, such as those described in Example 6. For example, assays in which a FIX polypeptide is administered to mice can be performed, and the in vivo recovery of the polypeptide assessed by measuring the amount of FIX in the plasma at Cₘₐₓ and comparing it to the amount of FIX administered. Improved in vivo recovery of a modified FIX polypeptide compared to an unmodified FIX polypeptide refers to an increase in in vivo recovery of a modified FIX polypeptide compared to an unmodified FIX polypeptide. The in vivo recovery of a modified FIX polypeptide can be increased by at least or about 1%, 2%, 3%, 4%, 5%, 6%, 7%, 8%, 9%, 10%, 20%, 30%, 40%, 50%, 60%, 70%, 80%, 90%, 91%, 92%, 93%, 94%, 95%, 96%, 97%, 98%, 99%, 100%, 200%, 300%, 400%, 500% or more compared to an unmodified FIX polypeptide.

[0129] As used herein, plasma half-life (t_{1/2}) refers the elimination half-life of a FIX polypeptide, or the time at which the plasma concentration of the FIX polypeptide has reached one half of its initial or maximal concentration following administration. Reference to plasma half-life includes plasma half-life during the α-, β-, and/or γ-phase. Plasma half-life can be assessed using methods well known in the art, such as those described in Example 6. For example, assays in which a FIX polypeptide is administered to mice can be performed, and the plasma half-life of the polypeptide assessed by measuring the amount of FIX in the plasma at various time points. The t_{1/2β}, for example, is calculated as −ln 2 divided by the negative slope during the terminal phase of the log-linear plot of the plasma FIX concentration-versus-time curve. Improved plasma half-life of a modified FIX polypeptide compared to an unmodified FIX polypeptide refers to an increase in plasma half-life of a modified FIX polypeptide compared to an unmodified FIX polypeptide. The plasma half-life of a modified FIX polypeptide can be increased by at least or about 1%, 2%, 3%, 4%, 5%, 6%, 7%, 8%, 9%, 10%, 20%, 30%, 40%, 50%, 60%, 70%, 80%, 90%, 91%, 92%, 93%, 94%, 95%, 96%, 97%, 98%, 99%, 100%, 200%, 300%, 400%, 500% or more compared to an unmodified FIX polypeptide.

[0130] As used herein, exposure in vivo refers to the amount of FIX polypeptide in the circulation following administration in relation to the plasma area under the concentration-time curve, or AUC, of FIX polypeptide administered. Exposure in vivo can be assessed using methods well known in the art, such as those described in Example 6. For example, assays in which a FIX polypeptide is administered to mice can be performed, and the in vivo recovery of the polypeptide assessed by measuring the amount of FIX in the plasma at various time points (i.e., AUC) and comparing it to the amount of FIX administered. Improved exposure in vivo of a modified FIX polypeptide compared to an unmodified FIX polypeptide refers to an increase in exposure in vivo of a modified FIX polypeptide compared to an unmodified FIX polypeptide. The exposure in vivo of a modified FIX polypeptide can be increased by at least or about 1%, 2%, 3%, 4%, 5%, 6%, 7%, 8%, 9%, 10%, 20%, 30%, 40%, 50%, 60%, 70%, 80%, 90%, 91%, 92%, 93%, 94%, 95%, 96%, 97%, 98%, 99%, 100%, 200%, 300%, 400%, 500% or more compared to an unmodified FIX polypeptide.

[0131] As used herein, volume of distribution refers to the distribution of a FIX polypeptide between plasma and the rest of the body following administration. It is defined as the volume in which the amount of polypeptide would need to be uniformly distributed to produce the observed concentration of polypeptide in the plasma. Volume of distribution can be assessed using methods well known in the art, such as those described in Example 6. For example, Vₛₛ, which is the steady state volume of distribution (calculated as MRT*Cl) and V_{z}, which is the volume of distribution based on the terminal elimination constant (β) (calculated as Cl/(ln 2/T_{1/2β}), can be assessed in assays in which a FIX polypeptide is administered to mice, and the concentration of the FIX in the plasma is determined at various time points. Improved volume of distribution of a modified FIX polypeptide compared with an unmodified FIX polypeptide, depending on the protein's mechanism of clearance and safety profile, can refer to either an increase or a decrease in the volume of distribution of a modified FIX polypeptide. For example, in cases where the polypeptide is distributed among multiple compartments, a decreased volume of distribution of a modified FIX polypeptide could result in significantly increased drug exposure and activity in the compartment of interest (e.g., the vascular compartment versus an extravascular compartment) compared with an unmodified FIX polypeptide. In other cases, for example, when drug safety is limited by Cₘₐₓ, redistribution into other compartments (e.g., binding to the surface of endothelial cells) can result in a longer terminal half-life and/or duration of action within the compartment of interest and a superior safety profile compared to the unmodified FIX polypeptide. The volume of distribution of a modified FIX polypeptide can be decreased by at least or about 1%, 2%, 3%, 4%, 5%, 6%, 7%, 8%, 9%, 10%, 20%, 30%, 40%, 50%, 60%, 70%, 80%, 90%, 91%, 92%, 93%, 94%, 95%, 96%, 97%, 98% or 99% compared to an unmodified FIX polypeptide. In other examples, the volume of distribution of the modified FIX polypeptide is increased by at least or about 1%, 2%, 3%, 4%, 5%, 6%, 7%, 8%, 9%, 10%, 20%, 30%, 40%, 50%, 60%, 70%, 80%, 90%, 91%, 92%, 93%, 94%, 95%, 96%, 97%, 98%, 99%, 100%, 200%, 300%, 400%, 500% or more of the volume of distribution of an unmodified FIX polypeptide.

[0132] As used herein, and known to those of skill in the art, International Units (IU) for coagulation factors, such as FIX and FVII, are assigned according to the World Health Organization (WHO) current International Standards (see, e.g., nibsc.org/documents/ifu/09-172.pdf). For example, for the modified FIX herein that comprises R318Y/R338E/T343R (SEQ ID NO: 394), 0.1 mg=460 IU. Similarly, other IUs for other coagulation factors, such as FVII, are defined by WHO. Hence, normal FIX levels are generally about or at or above 50 IU/dL, up to about 150 IU. IUs are defined by WHO International Standard 4th International Standard for Blood Coagulation Factors II, VII, IX, X, Plasma NIB SC code: 09/172 (Version 3.0, Dated 24 Feb. 2016). 100 IU/dl is 100% activity. Near normal coagulation FIX a FIX has about or at about 40%-150% of the activity in blood relative to the WHO 4th International Standard, where 100 IU/dl is 100% activity. Mild hemophilia is in the range of at or about 5 IU/dL-40 IU dL. The prophylactic methods herein either bring the range of FIX levels to mild hemophilia, or up to normal levels, and can achieve normal coagulation pharmacodynamics.

[0133] As used herein the term “assess”, and grammatical variations thereof, is intended to include quantitative and qualitative determination in the sense of obtaining an absolute value for the activity of a polypeptide, and also of obtaining an index, ratio, percentage, visual or other value indicative of the level of the activity. Assessment can be direct or indirect. For example, detection of cleavage of a substrate by a polypeptide can be by direct measurement of the product, or can be indirectly measured by determining the resulting activity of the cleaved substrate.

[0134] As used herein, “chymotrypsin numbering” refers to the amino acid numbering of a mature bovine chymotrypsin polypeptide of SEQ ID NO:19. Alignment of a protease domain of another protease, such as for example the protease domain of factor IX, can be made with chymotrypsin. In such an instance, the amino acids of factor IX that correspond to amino acids of chymotrypsin are given the numbering of the chymotrypsin amino acids. Corresponding positions can be determined by such alignment by one of skill in the art using manual alignments or by using the numerous alignment programs available (for example, BLASTP). Corresponding positions also can be based on structural alignments, for example by using computer simulated alignments of protein structure. Recitation that amino acids of a polypeptide correspond to amino acids in a disclosed sequence refers to amino acids identified upon alignment of the polypeptide with the disclosed sequence to maximize identity or homology (where conserved amino acids are aligned) using a standard alignment algorithm, such as the GAP algorithm. The corresponding chymotrypsin numbers of amino acid positions 181 to 415 of the FIX polypeptide set forth in SEQ ID NO:3 are provided in Table 1. The amino acid positions relative to the sequence set forth in SEQ ID NO:3 are in normal font, the amino acid residues at those positions are in bold, and the corresponding chymotrypsin numbers are in italics. For example, upon alignment of the mature factor IX (SEQ ID NO:3) with mature chymotrypsin (SEQ ID NO:19), the valine (V) at amino acid position 181 in factor IX is given the chymotrypsin numbering of V16. Subsequent amino acids are numbered accordingly. In one example, a glutamic acid (E) at amino acid position 213 of the mature factor IX (SEQ ID NO:3) corresponds to amino acid position E49 based on chymotrypsin numbering. Where a residue exists in a protease, but is not present in chymotrypsin, the amino acid residue is given a letter notation. For example, A95a and A95b by chymotrypsin numbering correspond to A261 and A262, respectively, by numbering relative to the mature factor IX sequence (SEQ ID NO:3).

TABLE 1
Chymotrypsin numbering of factor IX

| 181 | 182 | 183 | 184 | 185 | 186 | 187 | 188 | 189 | 190 | 191 | 192 | 193 | 194 | 195 |
|---|---|---|---|---|---|---|---|---|---|---|---|---|---|---|
| V | V | G | G | E | D | A | K | P | G | Q | F | P | W | Q |
| 16 | 17 | 18 | 19 | 20 | 21 | 22 | 23 | 24 | 25 | 26 | 27 | 28 | 29 | 30 |
| 196 | 197 | 198 | 199 | 200 | 201 | 202 | 203 | 204 | 205 | 206 | 207 | 208 | 209 | 210 |
| V | V | L | N | G | K | V | D | A | F | C | G | G | S | I |
| 31 | 32 | 33 | 34 | 35 | 37 | 38 | 39 | 40 | 41 | 42 | 43 | 44 | 45 | 46 |
| 211 | 212 | 213 | 214 | 215 | 216 | 217 | 218 | 219 | 220 | 221 | 222 | 223 | 224 | 225 |
| V | N | E | K | W | I | V | T | A | A | H | C | V | E | T |
| 47 | 48 | 49 | 50 | 51 | 52 | 53 | 54 | 55 | 56 | 57 | 58 | 59 | 60 | 60A |
| 226 | 227 | 228 | 229 | 230 | 231 | 232 | 233 | 234 | 235 | 236 | 237 | 238 | 239 | 240 |
| G | V | K | I | T | V | V | A | G | E | H | N | I | E | E |
| 61 | 62 | 63 | 64 | 65 | 66 | 67 | 68 | 69 | 70 | 71 | 72 | 73 | 74 | 75 |
| 241 | 242 | 243 | 244 | 245 | 246 | 247 | 248 | 249 | 250 | 251 | 252 | 253 | 254 | 255 |
| T | E | H | T | E | Q | K | R | N | V | I | R | I | I | P |
| 76 | 77 | 78 | 79 | 80 | 81 | 82 | 83 | 84 | 85 | 86 | 87 | 88 | 89 | 90 |
| 256 | 257 | 258 | 259 | 260 | 261 | 262 | 263 | 264 | 265 | 266 | 267 | 268 | 269 | 270 |
| H | H | N | Y | N | A | A | I | N | K | Y | N | H | D | I |
| 91 | 92 | 93 | 94 | 95 | 95A | 95B | 96 | 97 | 98 | 99 | 100 | 101 | 102 | 103 |
| 271 | 272 | 273 | 274 | 275 | 276 | 277 | 278 | 279 | 280 | 281 | 282 | 283 | 284 | 285 |
| A | L | L | E | L | D | E | P | L | V | L | N | S | Y | V |
| 104 | 105 | 106 | 107 | 108 | 109 | 110 | 111 | 112 | 113 | 114 | 115 | 116 | 117 | 118 |
| 286 | 287 | 288 | 289 | 290 | 291 | 292 | 293 | 294 | 295 | 296 | 297 | 298 | 299 | 300 |
| T | P | I | C | I | A | D | K | E | Y | T | N | I | F | L |
| 119 | 120 | 121 | 122 | 123 | 124 | 125 | 126 | 127 | 128 | 129 | 129A | 129B | 130 | 131 |
| 301 | 302 | 303 | 304 | 305 | 306 | 307 | 308 | 309 | 310 | 311 | 312 | 313 | 314 | 315 |
| K | F | G | S | G | Y | V | S | G | W | G | R | V | F | H |
| 132 | 133 | 134 | 135 | 136 | 137 | 138 | 139 | 140 | 141 | 142 | 143 | 144 | 145 | 147 |
| 316 | 317 | 318 | 319 | 320 | 321 | 322 | 323 | 324 | 325 | 326 | 327 | 328 | 329 | 330 |
| K | G | R | S | A | L | V | L | Q | Y | L | R | V | P | L |
| 148 | 149 | 150 | 151 | 152 | 153 | 154 | 155 | 156 | 157 | 158 | 159 | 160 | 161 | 162 |
| 331 | 332 | 333 | 334 | 335 | 336 | 337 | 338 | 339 | 340 | 341 | 342 | 343 | 344 | 345 |
| V | D | R | A | T | C | L | R | S | T | K | F | T | I | Y |
| 163 | 164 | 165 | 166 | 167 | 168 | 169 | 170 | 171 | 172 | 173 | 174 | 175 | 176 | 177 |
| 346 | 347 | 348 | 349 | 350 | 351 | 352 | 353 | 354 | 355 | 356 | 357 | 358 | 359 | 360 |
| N | N | M | F | C | A | G | F | H | E | G | G | R | D | S |
| 178 | 179 | 180 | 181 | 182 | 183 | 184 | 184A | 185 | 186 | 187 | 188 | 188A | 189 | 190 |
| 361 | 362 | 363 | 364 | 365 | 366 | 367 | 368 | 369 | 370 | 371 | 372 | 373 | 374 | 375 |
| C | Q | G | D | S | G | G | P | H | V | T | E | V | E | G |
| 191 | 192 | 193 | 194 | 195 | 196 | 197 | 198 | 199 | 200 | 201 | 202 | 203 | 204 | 205 |
| 376 | 377 | 378 | 379 | 380 | 381 | 382 | 383 | 384 | 385 | 386 | 387 | 388 | 389 | 390 |
| T | S | F | L | T | G | I | I | S | W | G | E | E | C | A |
| 206 | 207 | 208 | 209 | 210 | 211 | 212 | 213 | 214 | 215 | 216 | 217 | 219 | 220 | 221 |
| 391 | 392 | 393 | 394 | 395 | 396 | 397 | 398 | 399 | 400 | 401 | 402 | 403 | 404 | 405 |
| M | K | G | K | Y | G | I | Y | T | K | V | S | R | Y | V |
| 221A | 222 | 223 | 224 | 225 | 226 | 227 | 228 | 229 | 230 | 231 | 232 | 233 | 234 | 235 |

| 406 | 407 | 408 | 409 | 410 | 411 | 412 | 413 | 414 | 415 |
|---|---|---|---|---|---|---|---|---|---|
| N | W | I | K | E | K | T | K | L | T |
| 236 | 237 | 328 | 239 | 240 | 241 | 242 | 243 | 244 | 245 |

[0135] As used herein, nucleic acids include DNA, RNA and analogs thereof, including peptide nucleic acids (PNAs), and mixtures thereof. Nucleic acids can be single or double-stranded. When referring to probes or primers, which are optionally labeled, such as with a detectable label, such as a fluorescent or radiolabel, single-stranded molecules are contemplated. Such molecules are typically of a length such that their target is statistically unique or of low copy number (typically less than 5, generally less than 3) for probing or priming a library. Generally a probe or primer contains at least 14, 16 or 30 contiguous nucleotides of sequence complementary to or identical to a gene of interest. Probes and primers can be 10, 20, 30, 50, 100 or more nucleic acids long.

[0136] As used herein, a peptide refers to a polypeptide that is from 2 to 40 amino acids in length.

[0137] As used herein, the amino acids that occur in the various sequences of amino acids provided herein are identified according to their known, three-letter or one-letter abbreviations (Table 3). The nucleotides which occur in the various nucleic acid fragments are designated with the standard single-letter designations used routinely in the art.

[0138] As used herein, an “amino acid” is an organic compound containing an amino group and a carboxylic acid group. A polypeptide contains two or more amino acids. For purposes herein, amino acids include the twenty naturally-occurring amino acids, non-natural amino acids and amino acid analogs (i.e., amino acids wherein the α-carbon has a side chain). In keeping with standard polypeptide nomenclature described in J. Biol. Chem., 243:3557-3559 (1968), and adopted in 37 C.F.R. §§ 1.821-1.822, abbreviations for the amino acid residues are shown in Table 3:

TABLE 3
Table of Correspondence

SYMBOL

| 1-Letter | 3-Letter | AMINO ACID |
|---|---|---|
| Y | Tyr | Tyrosine |
| G | Gly | Glycine |
| F | Phe | Phenylalanine |
| M | Met | Methionine |
| A | Ala | Alanine |
| S | Ser | Serine |
| I | Ile | Isoleucine |
| L | Leu | Leucine |
| T | Thr | Threonine |
| V | Val | Valine |
| P | Pro | Proline |
| K | Lys | Lysine |
| H | His | Histidine |
| Q | Gln | Glutamine |
| E | Glu | Glutamic acid |
| Z | Glx | Glu and/or Gln |
| W | Trp | Tryptophan |
| R | Arg | Arginine |
| D | Asp | Aspartic acid |
| N | Asn | Asparagine |
| B | Asx | Asn and/or Asp |
| C | Cys | Cysteine |
| X | Xaa | Unknown or other |

[0139] All amino acid residue sequences represented herein by formulae have a left to right orientation in the conventional direction of amino-terminus to carboxyl-terminus. In addition, the phrase “amino acid residue” is broadly defined to include the amino acids listed in the Table of Correspondence (Table 3) and modified and unusual amino acids, such as those referred to in 37 C.F.R. §§ 1.821-1.822, and incorporated herein by reference. Furthermore, it should be noted that a dash at the beginning or end of an amino acid residue sequence indicates a peptide bond to a further sequence of one or more amino acid residues, to an amino-terminal group such as NH₂ or to a carboxyl-terminal group such as COOH.

[0140] As used herein, “naturally occurring amino acids” refer to the 20 L-amino acids that occur in polypeptides.

[0141] As used herein, “non-natural amino acid” refers to an organic compound containing an amino group and a carboxylic acid group that is not one of the naturally-occurring amino acids listed in Table 3. Non-naturally occurring amino acids thus include, for example, amino acids or analogs of amino acids other than the 20 naturally-occurring amino acids and include, but are not limited to, the D-isostereomers of amino acids. Exemplary non-natural amino acids are known to those of skill in the art and can be included in a modified factor IX polypeptide.

[0142] For purposes herein, conservative amino acid substitutions may be made in any of polypeptides and domains thereof provided that the resulting protein exhibits an activity of a FIX. Conservative amino acid substitutions, such as those set forth in Table 4, are those that do not eliminate proteolytic activity. Suitable conservative substitutions of amino acids are known to those of skill in this art and may be made generally without altering the biological activity of the resulting molecule. Those of skill in this art recognize that, in general, single amino acid substitutions in non-essential regions of a polypeptide do not substantially alter biological activity (see, e.g., Watson et al. Molecular Biology of the Gene, 4th Edition, 1987, The Benjamin/Cummings Pub. co., p. 224). Also included within the definition, is the catalytically active fragment of an MTSP, particularly a single chain protease portion. Conservative amino acid substitutions are made, for example, in accordance with those set forth in Table 4, which sets forth exemplary conservative amino acid substitutions, as follows:

TABLE 4

| Original residue | Conservative substitution |
|---|---|
| Ala (A) | Gly; Ser, Abu |
| Arg (R) | Lys, orn |
| Asn (N) | Gln; His |
| Cys (C) | Ser |
| Gln (Q) | Asn |
| Glu (E) | Asp |
| Gly (G) | Ala; Pro |
| His (H) | Asn; Gln |
| Ile (I) | Leu; Val; Met; Nle; Nva |
| Leu (L) | Ile; Val; Met; Nle; Nv |
| Lys (K) | Arg; Gln; Glu |
| Met (M) | Leu; Tyr; Ile; NLe Val |
| Ornithine | Lys; Arg |
| Phe (F) | Met; Leu; Tyr |
| Ser (S) | Thr |
| Thr (T) | Ser |
| Trp (W) | Tyr |
| Tyr (Y) | Trp; Phe |
| Val (V) | Ile; Leu; Met; Nle; Nv |

Other substitutions are also permissible and may be determined empirically or in accord with known conservative substitutions.

[0143] As used herein, a DNA construct is a single or double stranded, linear or circular DNA molecule that contains segments of DNA combined and juxtaposed in a manner not found in nature. DNA constructs exist as a result of human manipulation, and include clones and other copies of manipulated molecules.

[0144] As used herein, a DNA segment is a portion of a larger DNA molecule having specified attributes. For example, a DNA segment encoding a specified polypeptide is a portion of a longer DNA molecule, such as a plasmid or plasmid fragment, which, when read from the 5′ to 3′ direction, encodes the sequence of amino acids of the specified polypeptide.

[0145] As used herein, the term polynucleotide means a single- or double-stranded polymer of deoxyribonucleotides or ribonucleotide bases read from the 5′ to the 3′ end. Polynucleotides include RNA and DNA, and can be isolated from natural sources, synthesized in vitro, or prepared from a combination of natural and synthetic molecules. The length of a polynucleotide molecule is given herein in terms of nucleotides (abbreviated “nt”) or base pairs (abbreviated “bp”). The term nucleotides is used for single- and double-stranded molecules where the context permits. When the term is applied to double-stranded molecules it is used to denote overall length and will be understood to be equivalent to the term base pairs. It will be recognized by those skilled in the art that the two strands of a double-stranded polynucleotide can differ slightly in length and that the ends thereof can be staggered; thus all nucleotides within a double-stranded polynucleotide molecule cannot be paired. Such unpaired ends will, in general, not exceed 20 nucleotides in length.

[0146] As used herein, “primary sequence” refers to the sequence of amino acid residues in a polypeptide.

[0147] As used herein, “similarity” between two proteins or nucleic acids refers to the relatedness between the sequence of amino acids of the proteins or the nucleotide sequences of the nucleic acids. Similarity can be based on the degree of identity and/or homology of sequences of residues and the residues contained therein. Methods for assessing the degree of similarity between proteins or nucleic acids are known to those of skill in the art. For example, in one method of assessing sequence similarity, two amino acid or nucleotide sequences are aligned in a manner that yields a maximal level of identity between the sequences. “Identity” refers to the extent to which the amino acid or nucleotide sequences are invariant. Alignment of amino acid sequences, and to some extent nucleotide sequences, also can take into account conservative differences and/or frequent substitutions in amino acids (or nucleotides). Conservative differences are those that preserve the physico-chemical properties of the residues involved. Alignments can be global (alignment of the compared sequences over the entire length of the sequences and including all residues) or local (the alignment of a portion of the sequences that includes only the most similar region or regions).

[0148] As used herein, the terms “homology” and “identity” are used interchangeably, but homology for proteins can include conservative amino acid changes. In general to identify corresponding positions the sequences of amino acids are aligned so that the highest order match is obtained (see, e.g.: Computational Molecular Biology, Lesk, A. M., ed., Oxford University Press, New York, 1988; Biocomputing: Informatics and Genome Projects, Smith, D. W., ed., Academic Press, New York, 1993; Computer Analysis of Sequence Data, Part I, Griffin, A. M., and Griffin, H. G., eds., Humana Press, New Jersey, 1994; Sequence Analysis in Molecular Biology, von Heinje, G., Academic Press, 1987; Sequence Analysis Primer, Gribskov, M. and Devereux, J., eds., M Stockton Press, New York, 1991; and Carillo et al. (1988) SIAM J. Applied Math 48:1073).

[0149] As use herein, “sequence identity” refers to the number of identical amino acids (or nucleotide bases) in a comparison between a test and a reference polypeptide or polynucleotide. Homologous polypeptides refer to a pre-determined number of identical or homologous amino acid residues. Homology includes conservative amino acid substitutions as well identical residues. Sequence identity can be determined by standard alignment algorithm programs used with default gap penalties established by each supplier. Homologous nucleic acid molecules refer to a pre-determined number of identical or homologous nucleotides. Homology includes substitutions that do not change the encoded amino acid (i.e., “silent substitutions”) as well identical residues. Substantially homologous nucleic acid molecules hybridize typically at moderate stringency or at high stringency all along the length of the nucleic acid or along at least about 70%, 80% or 90% of the full-length nucleic acid molecule of interest. Also contemplated are nucleic acid molecules that contain degenerate codons in place of codons in the hybridizing nucleic acid molecule. (For determination of homology of proteins, conservative amino acids can be aligned as well as identical amino acids; in this case, percentage of identity and percentage homology varies). Whether any two nucleic acid molecules have nucleotide sequences (or any two polypeptides have amino acid sequences) that are at least 80%, 85%, 90%, 95%, 96%, 97%, 98% or 99% “identical” can be determined using known computer algorithms such as the “FAST A” program, using for example, the default parameters as in Pearson et al. (1988) Proc. Natl. Acad. Sci. U.S.A. 85:2444 (other programs include the GCG program package (Devereux, J., et al. (1984) Nucleic Acids Research 12(I):387), BLASTP, BLASTN, FASTA (Atschul, S. F., et al. (1990) J. Molec. Biol. 215:403; Guide to Huge Computers, Martin J. Bishop, ed., Academic Press, San Diego (1994), and Carillo et al. (1988) SIAM J. Applied Math 48:1073)). For example, the BLAST function of the National Center for Biotechnology Information database can be used to determine identity. Other commercially or publicly available programs include DNAStar “MegAlign” program (Madison, Wis.) and the University of Wisconsin Genetics Computer Group (UWG) “Gap” program (Madison Wis.). Percent homology or identity of proteins and/or nucleic acid molecules can be determined, for example, by comparing sequence information using a GAP computer program (e.g., Needleman et al. J. Mol. Biol. 48:443 (1970), as revised by Smith and Waterman (Adv. Appl. Math. 2: 482 (1981)). Briefly, a GAP program defines similarity as the number of aligned symbols (i.e., nucleotides or amino acids) which are similar, divided by the total number of symbols in the shorter of the two sequences. Default parameters for the GAP program can include: (1) a unary comparison matrix (containing a value of 1 for identities and 0 for non-identities) and the weighted comparison matrix of Gribskov et al. Nucl. Acids Res. 14: 6745 (1986), as described by Schwartz and Dayhoff, eds., Atlas of Protein Sequence and Structure, National Biomedical Research Foundation, pp. 353-358 (1979); (2) a penalty of 3.0 for each gap and an additional 0.10 penalty for each symbol in each gap; and (3) no penalty for end gaps.

[0150] Therefore, as used herein, the term “identity” represents a comparison between a test and a reference polypeptide or polynucleotide. In one non-limiting example, “at least 90% identical to” refers to percent identities from 90 to 100% relative to the reference polypeptides. Identity at a level of 90% or more is indicative of the fact that, assuming for exemplification purposes a test and reference polynucleotide length of 100 amino acids are compared, no more than 10% (i.e., 10 out of 100) of amino acids in the test polypeptide differs from that of the reference polypeptides. Similar comparisons can be made between a test and reference polynucleotides. Such differences can be represented as point mutations randomly distributed over the entire length of an amino acid sequence or they can be clustered in one or more locations of varying length up to the maximum allowable, e.g., 10/100 amino acid difference (approximately 90% identity). Differences are defined as nucleic acid or amino acid substitutions, insertions or deletions. At the level of homologies or identities above about 85-90%, the result should be independent of the program and gap parameters set; such high levels of identity can be assessed readily, often without relying on software.

[0151] As used herein, it also is understood that the terms “substantially identical” or “similar” varies with the context as understood by those skilled in the relevant art, but that those of skill can assess such.

[0152] As used herein, an aligned sequence refers to the use of homology (similarity and/or identity) to align corresponding positions in a sequence of nucleotides or amino acids. Typically, two or more sequences that are related by 50% or more identity are aligned. An aligned set of sequences refers to 2 or more sequences that are aligned at corresponding positions and can include aligning sequences derived from RNAs, such as ESTs and other cDNAs, aligned with genomic DNA sequence.

[0153] As used herein, “specifically hybridizes” refers to annealing, by complementary base-pairing, of a nucleic acid molecule (e.g., an oligonucleotide) to a target nucleic acid molecule. Those of skill in the art are familiar with in vitro and in vivo parameters that affect specific hybridization, such as length and composition of the particular molecule. Parameters particularly relevant to in vitro hybridization further include annealing and washing temperature, buffer composition and salt concentration. Exemplary washing conditions for removing non-specifically bound nucleic acid molecules at high stringency are 0.1×SSPE, 0.1% SDS, 65° C., and at medium stringency are 0.2×SSPE, 0.1% SDS, 50° C. Equivalent stringency conditions are known in the art. The skilled person can readily adjust these parameters to achieve specific hybridization of a nucleic acid molecule to a target nucleic acid molecule appropriate for a particular application.

[0154] As used herein, isolated or purified polypeptide or protein or biologically-active portion thereof is substantially free of cellular material or other contaminating proteins from the cell of tissue from which the protein is derived, or substantially free from chemical precursors or other chemicals when chemically synthesized. Preparations can be determined to be substantially free if they appear free of readily detectable impurities as determined by standard methods of analysis, such as thin layer chromatography (TLC), gel electrophoresis and high performance liquid chromatography (HPLC), used by those of skill in the art to assess such purity, or sufficiently pure such that further purification would not detectably alter the physical and chemical properties, such as proteolytic and biological activities, of the substance. Methods for purification of the compounds to produce substantially chemically pure compounds are known to those of skill in the art. A substantially chemically pure compound, however, can be a mixture of stereoisomers. In such instances, further purification might increase the specific activity of the compound.

[0155] The term substantially free of cellular material includes preparations of proteins in which the protein is separated from cellular components of the cells from which it is isolated or recombinantly-produced. In one embodiment, the term substantially free of cellular material includes preparations of protease proteins having less that about 30% (by dry weight) of non-protease proteins (also referred to herein as a contaminating protein), generally less than about 20% of non-protease proteins or 10% of non-protease proteins or less that about 5% of non-protease proteins. When the protease protein or active portion thereof is recombinantly produced, it also is substantially free of culture medium, i.e., culture medium represents less than, about, or equal to 20%, 10% or 5% of the volume of the protease protein preparation.

[0156] As used herein, the term substantially free of chemical precursors or other chemicals includes preparations of protease proteins in which the protein is separated from chemical precursors or other chemicals that are involved in the synthesis of the protein. The term includes preparations of protease proteins having less than about 30% (by dry weight), 20%, 10%, 5% or less of chemical precursors or non-protease chemicals or components.

[0157] As used herein, production by recombinant methods by using recombinant DNA methods refers to the use of the well-known methods of molecular biology for expressing proteins encoded by cloned DNA.

[0158] As used herein, vector (or plasmid) refers to discrete elements that are used to introduce heterologous nucleic acid into cells for either expression or replication thereof. The vectors typically remain episomal, but can be designed to effect integration of a gene or portion thereof into a chromosome of the genome. Also contemplated are vectors that are artificial chromosomes, such as bacterial artificial chromosomes, yeast artificial chromosomes and mammalian artificial chromosomes. Selection and use of such vehicles are well known to those of skill in the art.

[0159] As used herein, expression refers to the process by which nucleic acid is transcribed into mRNA and translated into peptides, polypeptides, or proteins. If the nucleic acid is derived from genomic DNA, expression can, if an appropriate eukaryotic host cell or organism is selected, include processing, such as splicing of the mRNA.

[0160] As used herein, an expression vector includes vectors capable of expressing DNA that is operatively linked with regulatory sequences, such as promoter regions, that are capable of effecting expression of such DNA fragments. Such additional segments can include promoter and terminator sequences, and optionally can include one or more origins of replication, one or more selectable markers, an enhancer, a polyadenylation signal, and the like. Expression vectors are generally derived from plasmid or viral DNA, or can contain elements of both. Thus, an expression vector refers to a recombinant DNA or RNA construct, such as a plasmid, a phage, recombinant virus or other vector that, upon introduction into an appropriate host cell, results in expression of the cloned DNA. Appropriate expression vectors are well known to those of skill in the art and include those that are replicable in eukaryotic cells and/or prokaryotic cells and those that remain episomal or those which integrate into the host cell genome.

[0161] As used herein, vector also includes “virus vectors” or “viral vectors.” Viral vectors are engineered viruses that are operatively linked to exogenous genes to transfer (as vehicles or shuttles) the exogenous genes into cells.

[0162] As used herein, an adenovirus refers to any of a group of DNA-containing viruses that cause conjunctivitis and upper respiratory tract infections in humans.

[0163] As used herein, naked DNA refers to histone-free DNA that can be used for vaccines and gene therapy. Naked DNA is the genetic material that is passed from cell to cell during a gene transfer processed called transformation or transfection. In transformation or transfection, purified or naked DNA that is taken up by the recipient cell will give the recipient cell a new characteristic or phenotype.

[0164] As used herein, operably or operatively linked when referring to DNA segments means that the segments are arranged so that they function in concert for their intended purposes, e.g., transcription initiates in the promoter and proceeds through the coding segment to the terminator.

[0165] As used herein, an agent that modulates the activity of a protein or expression of a gene or nucleic acid either decreases or increases or otherwise alters the activity of the protein or, in some manner, up- or down-regulates or otherwise alters expression of the nucleic acid in a cell.

[0166] As used herein, a “chimeric protein” or “fusion protein” refers to a polypeptide operatively-linked to a different polypeptide. A chimeric or fusion protein provided herein can include one or more FIX polypeptides, or a portion thereof, and one or more other polypeptides for any one or more of a transcriptional/translational control signals, signal sequences, a tag for localization, a tag for purification, part of a domain of an immunoglobulin G, and/or a targeting agent. A chimeric FIX polypeptide also includes those having their endogenous domains or regions of the polypeptide exchanged with another polypeptide. These chimeric or fusion proteins include those produced by recombinant means as fusion proteins, those produced by chemical means, such as by chemical coupling, through for example, coupling to sulfhydryl groups, and those produced by any other method whereby at least one polypeptide (i.e., FIX), or a portion thereof, is linked, directly or indirectly via linker(s) to another polypeptide.

[0167] As used herein, operatively-linked when referring to a fusion protein refers to a protease polypeptide and a non-protease polypeptide that are fused in-frame to one another. The non-protease polypeptide can be fused to the N-terminus or C-terminus of the protease polypeptide.

[0168] As used herein, a targeting agent, is any moiety, such as a protein or effective portion thereof, that provides specific binding to a cell surface molecule, such a cell surface receptor, which in some instances can internalize a bound conjugate or portion thereof. A targeting agent also can be one that promotes or facilitates, for example, affinity isolation or purification of the conjugate; attachment of the conjugate to a surface; or detection of the conjugate or complexes containing the conjugate.

[0169] As used herein, derivative or analog of a molecule refers to a portion derived from or a modified version of the molecule.

[0170] As used herein, “disease or disorder” refers to a pathological condition in an organism resulting from cause or condition including, but not limited to, infections, acquired conditions, genetic conditions, and characterized by identifiable symptoms. Diseases and disorders of interest herein are those involving coagulation, including those mediated by coagulation proteins and those in which coagulation proteins play a role in the etiology or pathology. Diseases and disorders also include those that are caused by the absence of a protein such as in hemophilia, and of particular interest herein are those disorders where coagulation does not occur due to a deficiency of defect in a coagulation protein.

[0171] As used herein, “procoagulant” refers to any substance that promotes blood coagulation.

[0172] As used herein, “anticoagulant” refers to any substance that inhibits blood coagulation.

[0173] As used herein, “hemophilia” refers to a bleeding disorder caused by a deficiency in a blood clotting factor. Hemophilia can be the result, for example, of absence, reduced expression, or reduced function of a clotting factor. The most common type of hemophilia is hemophilia A, which results from a deficiency in factor VIII. The second most common type of hemophilia is hemophilia B, which results from a deficiency in factor IX. Hemophilia C, also called FXI deficiency, is a milder and less common form of hemophilia.

[0174] As used herein, “congenital hemophilia” refers to types of hemophilia that are inherited. Congenital hemophilia results from mutation, deletion, insertion, or other modification of a clotting factor gene in which the production of the clotting factor is absent, reduced, or non-functional. For example, hereditary mutations in clotting factor genes, such as factor VIII and factor IX result in the congenital hemophilias, Hemophilia A and B, respectively.

[0175] As used herein, “acquired hemophilia” refers to a type of hemophilia that develops in adulthood from the production of autoantibodies that inactivate FVIII.

[0176] As used herein, “bleeding disorder” refers to a condition in which the subject has a decreased ability to control bleeding. Bleeding disorders can be inherited or acquired, and can result from, for example, defects or deficiencies in the coagulation pathway, defects or deficiencies in platelet activity, or vascular defects.

[0177] As used herein, “acquired bleeding disorder” refers to bleeding disorders that results from clotting deficiencies caused by conditions such as liver disease, vitamin K deficiency, or Coumadin® (warfarin) or other anti-coagulant therapy.

[0178] As used herein, “treating” a subject having a disease or condition means that a polypeptide, composition or other product provided herein is administered to the subject.

[0179] As used herein, a therapeutic agent, therapeutic regimen, radioprotectant, or chemotherapeutic mean conventional drugs and drug therapies, including vaccines, which are known to those skilled in the art. Radiotherapeutic agents are well known in the art.

[0180] As used herein, “treatment” means any manner in which the symptoms of a condition, disorder or disease are ameliorated or otherwise beneficially altered. Hence, treatment encompasses prophylaxis, therapy and/or cure. Treatment also encompasses any pharmaceutical use of the compositions herein. Treatment also encompasses any pharmaceutical use of a modified FIX and compositions provided herein.

[0181] As used herein, amelioration of the symptoms of a particular disease or disorder by a treatment, such as by administration of a pharmaceutical composition or other therapeutic, refers to any lessening, whether permanent or temporary, lasting or transient, of the symptoms that can be attributed to or associated with administration of the composition or therapeutic.

[0182] As used herein, “prevention” or “prophylaxis” refers to methods in which the risk of developing disease or condition is reduced. Prophylaxis includes reduction in the risk of developing a disease or condition and/or a prevention of worsening of symptoms or progression of a disease or reduction in the risk of worsening of symptoms or progression of a disease.

[0183] As used herein, an “effective amount” of a compound or composition for treating a particular disease is an amount that is sufficient to ameliorate, or in some manner reduce the symptoms associated with the disease. Such amount can be administered as a single dosage or can be administered according to a regimen, whereby it is effective. The amount can cure the disease but, typically, is administered in order to ameliorate the symptoms of the disease. Typically, repeated administration is required to achieve a desired amelioration of symptoms.

[0184] As used herein, “therapeutically effective amount” or “therapeutically effective dose” refers to an agent, compound, material, or composition containing a compound that is at least sufficient to produce a therapeutic effect. An effective amount is the quantity of a therapeutic agent necessary for preventing, curing, ameliorating, arresting or partially arresting a symptom of a disease or disorder.

[0185] As used herein, “patient” or “subject” to be treated includes humans and or non-human animals, including mammals. Mammals include primates, such as humans, chimpanzees, gorillas and monkeys; domesticated animals, such as dogs, horses, cats, pigs, goats, cows; and rodents such as mice, rats, hamsters and gerbils.

[0186] As used herein, a “combination” refers to any association between two or among more items. The association can be spatial or refer to the use of the two or more items for a common purpose.

[0187] As used herein, a “composition” refers to any mixture of two or more products or compounds (e.g., agents, modulators, regulators, etc.). It can be a solution, a suspension, liquid, powder, a paste, aqueous or non-aqueous formulations or any combination thereof.

[0188] As used herein, an “article of manufacture” is a product that is made and sold. As used throughout this application, the term is intended to encompass modified protease polypeptides and nucleic acids contained in articles of packaging.

[0189] As used herein, “fluid” refers to any composition that can flow. Fluids thus encompass compositions that are in the form of semi-solids, pastes, solutions, aqueous mixtures, gels, lotions, creams and other such compositions.

[0190] As used herein, a “kit” refers to a packaged combination, optionally including reagents and other products and/or components for practicing methods using the elements of the combination. For example, kits containing a modified protease polypeptide or nucleic acid molecule provided herein and another item for a purpose including, but not limited to, administration, diagnosis, and assessment of a biological activity or property are provided. Kits optionally include instructions for use.

[0191] As used herein, antibody includes antibody fragments, such as Fab fragments, which are composed of a light chain and the variable region of a heavy chain.

[0192] As used herein, a “receptor” refers to a molecule that has an affinity for a particular ligand. Receptors can be naturally-occurring or synthetic molecules. Receptors also can be referred to in the art as anti-ligands.

[0193] As used herein, “animal” includes any animal, such as, but not limited to; primates including humans, gorillas and monkeys; rodents, such as mice and rats; fowl, such as chickens; ruminants, such as goats, cows, deer, sheep; ovine, such as pigs and other animals. Non-human animals exclude humans as the contemplated animal. The proteases provided herein are from any source, animal, plant, prokaryotic and fungal.

[0194] As used herein, gene therapy involves the transfer of heterologous nucleic acid, such as DNA, into certain cells, target cells, of a mammal, particularly a human, with a disorder or condition for which such therapy is sought. The nucleic acid, such as DNA, is introduced into the selected target cells, such as directly or in a vector or other delivery vehicle, in a manner such that the heterologous nucleic acid, such as DNA, is expressed and a therapeutic product encoded thereby is produced. Alternatively, the heterologous nucleic acid, such as DNA, can in some manner mediate expression of DNA that encodes the therapeutic product, or it can encode a product, such as a peptide or RNA that in some manner mediates, directly or indirectly, expression of a therapeutic product. Genetic therapy also can be used to deliver nucleic acid encoding a gene product that replaces a defective gene or supplements a gene product produced by the mammal or the cell in which it is introduced. The introduced nucleic acid can encode a therapeutic compound, such as a protease or modified protease, that is not normally produced in the mammalian host or that is not produced in therapeutically effective amounts or at a therapeutically useful time. The heterologous nucleic acid, such as DNA, encoding the therapeutic product can be modified prior to introduction into the cells of the afflicted host in order to enhance or otherwise alter the product or expression thereof. Genetic therapy also can involve delivery of an inhibitor or repressor or other modulator of gene expression.

[0195] As used herein, heterologous nucleic acid is nucleic acid that is not normally produced in vivo by the cell in which it is expressed or that is produced by the cell but is at a different locus or expressed differently or that mediates or encodes mediators that alter expression of endogenous nucleic acid, such as DNA, by affecting transcription, translation, or other regulatable biochemical processes. Heterologous nucleic acid is generally not endogenous to the cell into which it is introduced, but has been obtained from another cell or prepared synthetically. Heterologous nucleic acid can be endogenous, but is nucleic acid that is expressed from a different locus or altered in its expression. Generally, although not necessarily, such nucleic acid encodes RNA and proteins that are not normally produced by the cell or in the same way in the cell in which it is expressed. Heterologous nucleic acid, such as DNA, also can be referred to as foreign nucleic acid, such as DNA. Thus, heterologous nucleic acid or foreign nucleic acid includes a nucleic acid molecule not present in the exact orientation or position as the counterpart nucleic acid molecule, such as DNA, is found in a genome. It also can refer to a nucleic acid molecule from another organism or species (i.e., exogenous).

[0196] Any nucleic acid, such as DNA, that one of skill in the art would recognize or consider as heterologous or foreign to the cell in which the nucleic acid is expressed is herein encompassed by heterologous nucleic acid; heterologous nucleic acid includes exogenously added nucleic acid that also is expressed endogenously. Examples of heterologous nucleic acid include, but are not limited to, nucleic acid that encodes traceable marker proteins, such as a protein that confers drug resistance, nucleic acid that encodes therapeutically effective substances, such as anti-cancer agents, enzymes and hormones, and nucleic acid, such as DNA, that encodes other types of proteins, such as antibodies. Antibodies that are encoded by heterologous nucleic acid can be secreted or expressed on the surface of the cell in which the heterologous nucleic acid has been introduced.

[0197] As used herein, a therapeutically effective product for gene therapy is a product that is encoded by heterologous nucleic acid, typically DNA, that, upon introduction of the nucleic acid into a host, a product is expressed that ameliorates or eliminates the symptoms, manifestations of an inherited or acquired disease or that cures the disease. Also included are biologically active nucleic acid molecules, such as RNAi and antisense.

[0198] As used herein, recitation that a polypeptide “consists essentially” of a recited sequence of amino acids means that only the recited portion, or a fragment thereof, of the full-length polypeptide is present. The polypeptide can optionally, and generally will, include additional amino acids from another source or can be inserted into another polypeptide.

[0199] As used herein, the singular forms “a,” “an” and “the” include plural referents unless the context clearly dictates otherwise. Thus, for example, reference to a compound, comprising “an extracellular domain” includes compounds with one or a plurality of extracellular domains.

[0200] As used herein, ranges and amounts can be expressed as “about” a particular value or range. About also includes the exact amount. Hence, “about 5 bases” means “about 5 bases” and also “5 bases.”

[0201] As used herein, “optional” or “optionally” means that the subsequently described event or circumstance does or does not occur, and that the description includes instances where said event or circumstance occurs and instances where it does not. For example, an optionally substituted group means that the group is unsubstituted or is substituted.

[0202] As used herein, the abbreviations for any protective groups, amino acids and other compounds, are, unless indicated otherwise, in accord with their common usage, recognized abbreviations, or the IUPAC-IUB Commission on Biochemical Nomenclature (see, (1972) Biochem. 11:1726).

[0203] Exemplary abbreviations as used below, include, but are not limited to:

### List of Abbreviations

[0204] AAV Adeno-associated viral

[0205] aPTT Activated partial thromboplastin time

[0206] ATIII Anti-thrombin III

[0207] AUC Area under curve

[0208] BA Bioavailability

[0209] CDC Centers for Disease Control and Prevention

[0210] CHO Chinese Hamster Ovary

[0211] CHO Chinese Hamster Ovary

[0212] CHPS Canadian hemophilia primary prophylaxis study

[0213] CHPS Canadian hemophilia primary prophylaxis study

[0214] CL Clearance

[0215] Cₘₐₓ Maximum concentration

[0216] C_{ss max} Maximum concentration at steady-state

[0217] Cₜ Concentration at time t

[0218] CVAD Central venous access devices

[0219] DNA Deoxyribonucleic acid

[0220] DP Drug product

[0221] ED Exposure days

[0222] EHL Extended half-life

[0223] EPAR European Public Assessment Report

[0224] FIX Factor IX

[0225] GLA Gamma-carboxyglutamic acid

[0226] HB Hemophilia B

[0227] HTC Hemophilia treatment centers

[0228] INN International Non-proprietary Name

[0229] IV Intravenously

[0230] IVR In vivo recovery

[0231] Kel terminal rate constant

[0232] MOA Mechanism of action

[0233] MRI Magnetic resonance imaging

[0234] MRT mean residence time;

[0235] ND Not Detected

[0236] NIB SC National Institute of Biological Standards and Control

[0237] NT Not Tested

[0238] PD Pharmacodynamics

[0239] PEG Polyethylene glycol

[0240] PK Pharmacokinetic

[0241] PND Prenatal diagnosis

[0242] PT Prothrombin time

[0243] PTC Plasma thromboplastin component

[0244] PUP Previously untreated patient

[0245] QD Once a day

[0246] RhFIX Recombinant human FIX

[0247] SC Subcutaneous

[0248] SNVs Single nucleotide variants

[0249] SWFI Sterile water for injection

[0250] TAT Thrombin-anti-thrombin

[0251] UDC Universal Data Collection

[0252] Vₛₛ volume of distribution at steady state

[0253] WBCT Whole Blood Clotting Time

[0254] WCB Working cell bank

[0255] WFH World Federation of Hemophilia's

[0256] WHO World Health Organization

[0257] WT Wild type

[0258] WT-FIX Wild type FIX

### B. HEMOSTASIS AND ROLE OF FACTOR IX

[0259] Provided herein are modified Factor IX (FIX) polypeptides, including modified FIX and FIXa polypeptides and catalytically active fragments thereof. Factor IX polypeptides play a role in the regulation of and process of hemostasis, and hence can be used as therapeutic agents. Effective delivery of therapeutic proteins such as FIX for clinical use is a major challenge to pharmaceutical science. Once in the blood stream, these proteins are constantly eliminated from circulation within a short time by different physiological processes, involving metabolism as well as clearance using normal pathways for protein elimination, such as (glomerular) filtration in the kidneys or proteolysis in blood. Once in the luminal gastrointestinal tract, these proteins are constantly digested by luminal proteases. The latter can be a limiting process affecting the half-life of proteins used as therapeutic agents in intravenous injection. Additionally, inhibitors in the blood can specifically inhibit the activity of the therapeutic protein. For example, antithrombin (AT-III), heparin, and the AT-III/heparin complex, can inhibit the coagulant activity of FIX. More efficacious variants of FIX with improved properties, including improved pharmacokinetic and pharmacodynamic properties, increased catalytic activity, and/or increased resistance to inhibitors, are needed.

[0260] The modified FIX polypeptides provided herein exhibit improved properties, including improved pharmacokinetic properties, such as increased serum half-life; increased resistance to inhibitors, such as antithrombin III (AT-III), heparin and the AT-III/heparin complex; increased catalytic activity; or any combination thereof. Hence, provided are modified FIX polypeptides that have increased coagulant activity. Accordingly, these polypeptides have a variety of uses and applications, for example, as therapeutics for modulating hemostasis. The following discussion provides a review of the coagulation process and the role of Factor IX in this process, before a discussion of factor IX, and modifications thereof.

[0261] Hemostasis is the physiological mechanism that stems the bleeding that results from injury to the vasculature. Normal hemostasis depends on cellular components and soluble plasma proteins, and involves a series of signaling events that ultimately leads to the formation of a blood clot. Coagulation is quickly initiated after an injury occurs to the blood vessel and endothelial cells are damaged. In the primary phase of coagulation, platelets are activated to form a hemostatic plug at the site of injury. Secondary hemostasis follows involving plasma coagulation factors, which act in a proteolytic cascade resulting in the formation of fibrin strands which strengthen the platelet plug.

[0262] Upon vessel injury, the blood flow to the immediate injured area is restricted by vascular constriction allowing platelets to adhere to the newly-exposed fibrillar collagen on the subendothelial connective tissue. This adhesion is dependent upon the von Willebrand factor (vWF), which binds to the endothelium within three seconds of injury, thereby facilitating platelet adhesion and aggregation. Activation of the aggregated platelets results in the secretion of a variety of factors, including ADP, ATP, thromboxane and serotonin. Adhesion molecules, fibrinogen, vWF, thrombospondin and fibronectin also are released. Such secretion promotes additional adhesion and aggregation of platelets, increased platelet activation and blood vessel constriction, and exposure of anionic phospholipids on the platelet surface that serve as platforms for the assembly of blood coagulation enzyme complexes. The platelets change shape leading to pseudopodia formation, which further facilitates aggregation to other platelets resulting in a loose platelet plug.

[0263] A clotting cascade of peptidases (the coagulation cascade) is simultaneously initiated. The coagulation cascade involves a series of activation events involving proteolytic cleavage. In such a cascade, an inactive protein of a serine protease (also called a zymogen) is converted to an active protease by cleavage of one or more peptide bonds, which then serves as the activating protease for the next zymogen molecule in the cascade, ultimately resulting in clot formation by the cross-linking of fibrin. For example, the cascade generates activated molecules such as thrombin (from cleavage of prothrombin), which further activates platelets, and also generates fibrin from cleavage of fibrinogen. Fibrin then forms a cross-linked polymer around the platelet plug to stabilize the clot. Upon repair of the injury, fibrin is digested by the fibrinolytic system, the major components of which are plasminogen and tissue-type plasminogen activator (tPA). Both of these proteins are incorporated into polymerizing fibrin, where they interact to generate plasmin, which, in turn, acts on fibrin to dissolve the preformed clot. During clot formation, coagulation factor inhibitors also circulate through the blood to prevent clot formation beyond the injury site.

[0264] The interaction of the system, from injury to clot formation and subsequent fibrinolysis, is described below.

[0265] 1. Platelet Adhesion and Aggregation

[0266] The clotting of blood is actively circumvented under normal conditions. The vascular endothelium supports vasodilation, inhibits platelet adhesion and activation, suppresses coagulation, enhances fibrin cleavage and is anti-inflammatory in character. Vascular endothelial cells secrete molecules such as nitrous oxide (NO) and prostacyclin, which inhibit platelet aggregation and dilate blood vessels. Release of these molecules activates soluble guanylate cyclases (sGC) and cGMP-dependent protein kinase I (cGKI) and increases cyclic guanosine monophosphate (cGMP) levels, which cause relaxation of the smooth muscle in the vessel wall. Furthermore, endothelial cells express cell-surface ADPases, such as CD39, which control platelet activation and aggregation by converting ADP released from platelets into adenine nucleotide platelet inhibitors. The endothelium also plays an important role in the regulation of the enzymes in the fibrinolytic cascade. Endothelial cells directly promote the generation of plasmin through the expression of receptors of plasminogen (annexin II) and urokinase, as well as the secretion of tissue-type and urokinase plasminogen activators, all of which promote clot clearance. In a final layer of prothrombotic regulation, endothelial cells play an active role in inhibiting the coagulation cascade by producing heparan sulfate, which increases the kinetics of antithrombin III inhibition of thrombin and other coagulation factors.

[0267] Under acute vascular trauma, however, vasoconstrictor mechanisms predominate and the endothelium becomes prothrombotic, procoagulatory and proinflammatory in nature. This is achieved by a reduction of endothelial dilating agents: adenosine, NO and prostacyclin; and the direct action of ADP, serotonin and thromboxane on vascular smooth muscle cells to elicit their contraction (Becker et al., (2000) Z. Kardiol. 89:160-167). The chief trigger for the change in endothelial function that leads to the formation of hemostatic thrombus is the loss of the endothelial cell barrier between blood and extracellular matrix (ECM) components (Ruggeri (2002) Nat. Med. 8:1227-1234). Circulating platelets identify and discriminate areas of endothelial lesions and adhere to the exposed sub endothelium. Their interaction with the various thrombogenic substrates and locally-generated or released agonists results in platelet activation. This process is described as possessing two stages, 1) adhesion: the initial tethering to a surface, and 2) aggregation: the platelet-platelet cohesion (Savage et al. (2001) Curr. Opin. Hematol. 8:270-276).

[0268] Platelet adhesion is initiated when the circulating platelets bind to exposed collagen through interaction with collagen binding proteins on the cell surface, and through interaction with vWF, also present on the endothelium. vWF protein is a multimeric structure of variable size, secreted in two directions by the endothelium; basolaterally and into the bloodstream. vWF also binds to factor VIII, which is important in the stabilization of factor VIII and its survival in the circulation.

[0269] Platelet adhesion and subsequent activation is achieved when vWF binds via its A1 domain to GPIb (part of the platelet glycoprotein receptor complex GPIb-IX-V). The interaction between vWF and GPIb is regulated by shear force such that an increase in the shear stress results in a corresponding increase in the affinity of vWF for GPIb. Integrin α1β2, also known on leukocytes as VLA-2, is the major collagen receptor on platelets, and engagement through this receptor generates the intracellular signals that contribute to platelet activation. Binding through α1β2 facilitates the engagement of the lower-affinity collagen receptor, GP VI. This is part of the immunoglobulin superfamily and is the receptor that generates the most potent intracellular signals for platelet activation. Platelet activation results in the release of adenosine diphosphate (ADP), which is converted to thromboxane A2.

[0270] Platelet activation also results in the surface expression of platelet glycoprotein IIb-IIIa (GP IIb-IIIa) receptors, also known as platelet integrin αIIbβ3. GP IIb-IIIa receptors allow the adherence of platelets to each other (i.e., aggregation) by virtue of fibrinogen molecules linking the platelets through these receptors. This results in the formation of a platelet plug at the site of injury to help prevent further blood loss, while the damaged vascular tissue releases factors that initiate the coagulation cascade and the formation of a stabilizing fibrin mesh around the platelet plug.

[0271] 2. Coagulation Cascade

[0272] The coagulation pathway is a proteolytic pathway where each enzyme is present in the plasma as a zymogen, or inactive form. Cleavage of the zymogen is regulated to release the active form from the precursor molecule. The pathway functions as a series of positive and negative feedback loops that control the activation process, where the ultimate goal is to produce thrombin, which can then convert soluble fibrinogen into fibrin to form a clot. The coagulation factors, and other proteins, participate in blood coagulation through one or more of the intrinsic, extrinsic or common pathway of coagulation. As discussed below, these pathways are interconnected, and blood coagulation likely occurs through a cell-based model of activation.

[0273] The generation of thrombin has historically been divided into three pathways, the intrinsic (indicating that all components of the pathway are intrinsic to plasma) and extrinsic (indicating that one or more components of the pathway are extrinsic to plasma) pathways that provide alternative routes for the generation of activated Factor X (FXa), and the final common pathway which results in thrombin formation (FIG. 1). These pathways participate together in an interconnected and interdependent process to effect coagulation. A cell-based model of coagulation was developed that describes these pathways (FIG. 2) (Hoffman et al. (2001) J. Thromb. Haemost. 85:958-965). In this model, the “extrinsic” and “intrinsic” pathways are effected on different cell surfaces; the tissue factor (TF)-bearing cell and the platelet, respectively. The process of coagulation is separated into distinct phases, initiation, amplification and propagation, during which the extrinsic and intrinsic pathways function at various stages to produce the large burst of thrombin required to convert sufficient quantities of fibrinogen to fibrin for clot formation.

[0274] a. Initiation

[0275] FVII is considered to be the coagulation factor responsible for initiating the coagulation cascade, which initiation is dependent on its interaction with TF. TF is a transmembrane glycoprotein expressed by a variety of cells such as smooth muscle cells, fibroblasts, monocytes, lymphocytes, granulocytes, platelets and endothelial cells. Myeloid cells and endothelial cells only express TF when they are stimulated, such as by proinflammatory cytokines. Smooth muscle cells and fibroblasts, however, express TF constitutively. Accordingly, once these cells come in contact with the bloodstream following tissue injury, the coagulation cascade is rapidly initiated by the binding of TF with Factor VII or FVIIa in the plasma. TF/FVIIa complexes can be formed by the direct binding of FVIIa to TF, or by the binding of FVII to TF and then the subsequent activation of FVII to FVIIa by a plasma protease, such as FXa, FIXa, FXIIa, or FVIIa itself. The TF/FVIIa complex remains anchored to the TF-bearing cell where it activates small amounts FX into FXa in what is known as the “extrinsic pathway” of coagulation.

[0276] The TF/FVIIa complex also cleaves small amounts of FIX into FIXa. FXa associates with its cofactor FVa to also form a complex on the TF-bearing cell that can then covert prothrombin to thrombin. The small amount of thrombin produced is, however, inadequate to support the required fibrin formation for complete clotting. Additionally, any active FXa and FIXa are inhibited in the circulation by antithrombin III (AT-III) and other serpins, which are discussed in more detail below. This would normally prevent clot formation in the circulation. In the presence of injury, however, damage to the vasculature results in platelet aggregation and activation at this site of thrombin formation, thereby allowing for amplification of the coagulation signal.

[0277] b. Amplification

[0278] Amplification takes place when thrombin binds to and activates the platelets. The activated platelets release FV from their alpha granules, which is activated by thrombin to FVa. Thrombin also releases and activates FVIII from the FVIII/vWF complex on the platelet membrane, and cleaves FXI into FXIa. These reactions generate activated platelets that have FVa, FVIIIa and FIXa on their surface, which set the stage for a large burst of thrombin generation during the propagation stage.

[0279] c. Propagation

[0280] Propagation of coagulation occurs on the surface of large numbers of platelets at the site of injury. As described above, the activated platelets have FXIa, FVIIIa and FVa on their surface. It is here that the extrinsic pathway is effected. FXIa activates FIX to FIXa, which can then bind with FVIIIa. This process, in addition to the small amounts of FIXa that is generated by cleavage of FIX by the TF/FVIIa complex on the TF-bearing cell, generates a large amount FIXa in complex with its cofactor, FVIIIa, calcium and a suitable phospholipid surface. This complex is termed the tenase or Xase complex, and it cleaves and activates the Factor X (FX) to Factor Xa (FXa). The FXa molecules bind to FVa to generate the prothrombinase complexes that activate prothrombin to thrombin. Thrombin acts in a positive feedback loop to activate even more platelets and again initiates the processes described for the amplification phase.

[0281] Very shortly, there are sufficient numbers of activated platelets with the appropriate complexes to generate the burst of thrombin that is large enough to generate sufficient amounts of fibrin from fibrinogen to form a hemostatic fibrin clot. Fibrinogen is a dimer soluble in plasma which, when cleaved by thrombin, releases fibrinopeptide A and fibrinopeptide B. Fibrinopeptide B is then cleaved by thrombin, and the fibrin monomers formed by this second proteolytic cleavage spontaneously forms an insoluble gel. The polymerized fibrin is held together by noncovalent and electrostatic forces and is stabilized by the transamidating enzyme factor XIIIa (FXIIIa), produced by the cleavage of FXIII by thrombin. Thrombin also activates TAFI, which inhibits fibrinolysis by reducing plasmin generation at the clot surface. Additionally, thrombin itself is incorporated into the structure of the clot for further stabilization. These insoluble fibrin aggregates (clots), together with aggregated platelets (thrombi), block the damaged blood vessel and prevent further bleeding.

[0282] 3. Regulation of Coagulation

[0283] During coagulation, the cascade is regulated by constitutive and stimulated processes to inhibit further clot formation. Regulation is important to a) limit ischemia of tissues by fibrin clot formation, and b) prevent widespread thrombosis by localizing the clot formation only to the site of tissue injury.

[0284] Regulation is achieved by the actions of several inhibitory molecules. For example, antithrombin III (AT-III) and tissue factor pathway inhibitor (TFPI) work constitutively to inhibit factors in the coagulation cascade. TFPI predominantly inhibits FXa and FVIIa/TF complex. In contrast, AT-III, which is a serine protease inhibitor (serpin), predominantly inhibits thrombin, FXa, and FIXa. The inhibition of these coagulation factors by AT-III is enhanced greatly by heparin, which binds AT-III to induce an activating conformational change that accelerates the inhibitory reaction. Heparin also can inhibit the activity of the FIXa/FVIIIa complex in an AT-III-independent manner (Yuan et al., (2005) Biochemistry 44:3615-3625). An additional factor, Protein C, which is stimulated via platelet activation, regulates coagulation by proteolytic cleavage and inactivation of FVa and FVIIIa. Protein S enhances the activity of Protein C. Further, another factor which contributes to coagulation inhibition is the integral membrane protein thrombomodulin, which is produced by vascular endothelial cells and serves as a receptor for thrombin. Binding of thrombin to thrombomodulin inhibits thrombin procoagulant activities and also contributes to protein C activation.

[0285] Fibrinolysis, the breakdown of the fibrin clot, also provides a mechanism for regulating coagulation. The cross-linked fibrin multimers in a clot are broken down to soluble polypeptides by plasmin, a serine protease. Plasmin can be generated from its inactive precursor plasminogen and recruited to the site of a fibrin clot in two ways: by interaction with tissue plasminogen activator (tPA) at the surface of a fibrin clot, and by interaction with urokinase plasminogen activator (uPA) at a cell surface. The first mechanism appears to be the major one responsible for the dissolution of clots within blood vessels. The second, although capable of mediating clot dissolution, can play a major role in tissue remodeling, cell migration, and inflammation.

[0286] Clot dissolution also is regulated in two ways. First, efficient plasmin activation and fibrinolysis occur only in complexes formed at the clot surface or on a cell membrane, while proteins free in the blood are inefficient catalysts and are rapidly inactivated. Second, plasminogen activators and plasmin are inactivated by molecules such as plasminogen activator inhibitor type 1 (PAI-1) and PAI-2 which act on the plasminogen activators, and α2-antiplasmin and α 2-macroglobulin that inactivate plasmin. Under normal circumstances, the timely balance between coagulation and fibrinolysis results in the efficient formation and clearing of clots following vascular injury, while simultaneously preventing unwanted thrombotic or bleeding episodes.

### C. FACTOR IX (FIX) STRUCTURE AND FUNCTION

[0287] Modified FIX polypeptides described herein with improved activities or functions are for use in the prophylactic subcutaneous methods and regimens. FIX is a polypeptide that is involved in the coagulation cascade. The role of FIX in the coagulation cascade is related to its structure and mechanism of activation. It is understood that the modulation of coagulation by modified FIX polypeptides provided herein also is linked to its structure and mechanism of activation. These features can be the same as an unmodified FIX polypeptide. In other cases, these features can be modified in a FIX polypeptide provided herein, thus resulting in a polypeptide with altered or improved activities or properties. For example, modification of a FIX polypeptide can alter one or more activities of a FIX polypeptide. For example, provided are modified FIX polypeptides that exhibit increased levels of glycosylation compared to a wild-type FIX polypeptide. The modified FIX polypeptides can thus exhibit improved pharmacokinetic properties, such as reduced clearance and increased serum half-life compared to a wild-type FIX polypeptide, when tested using in vivo assays. Also provided are modified FIX polypeptides that exhibit increased resistance to inhibitors, such as AT-III, heparin and the AT-III/heparin complex; and/or increased catalytic activity. Thus, provided are modified FIX polypeptides that exhibit improved therapeutic properties compared to an unmodified FIX polypeptide. A summary of structural and functional features of FIX polypeptides and modified FIX polypeptides are described below.

[0288] Factor IX is a vitamin K-dependent serine protease and is an important coagulation factor in hemostasis. It is synthesized as a single chain zymogen in the liver and circulates in the blood in this inactivated state until activated as part of the coagulation cascade. Following activation from the FIX zymogen to activated FIX (FIXa) by FXIa or the TF/FVIIa complex, FIXa binds its cofactor, FVIIIa. The resulting FIXa/FVIIIa complex binds and activates FX to FXa, thus continuing the coagulation cascade described above to establish hemostasis. The concentration of FIX in the blood is approximately 4-5 μg/mL, and it has a half-life of approximately 18-24 hours.

[0289] Hemophilia B, also known as Christmas disease or Factor IX deficiency, is caused by a deficiency or dysfunction of FIX resulting from any one or more of a variety of mutations in the FIX gene. While less prevalent than Hemophilia A, Hemophilia B remains a significant disease in which recurrent joint bleeds can lead to synovial hypertrophy, chronic synovitis, with destruction of synovium, cartilage, and bone leading to chronic pain, stiffness of the joints, and limitation of movement because of progressive severe joint damage. Recurrent muscle bleeds also produce acute pain, swelling, and limitation of movement, while bleeding at other sites can contribute to morbidity and mortality. Treatment is typically by replacement therapy with recombinant FIX (rFIX). Provided herein are modified FIX polypeptides that are designed to have increased coagulation activity upon activation, and that can serve as improved therapeutics to treat diseases and conditions amenable to factor IX therapy, such as Hemophilia B.

[0290] 1. FIX Structure

[0291] The human FIX gene is located on the X chromosome and is approximately 34 kb long with eight exons. The human FIX transcript is 2803 nucleotides and contains a short 5′ untranslated region, an open reading frame (including stop codon) of 1383 nucleotides and a 3′ untranslated region. The 1383 nucleotide open reading frame (or FIX mRNA; SEQ ID NO:1) encodes a 461 amino acid precursor polypeptide (Swiss-Prot accession no. P00740; SEQ ID NO:2) containing a 28 amino acid N-terminal signal peptide (amino acids 1-28 of SEQ ID NO:2) that directs the factor IX polypeptide to the cellular secretory pathway. In addition the hydrophobic signal peptide, the FIX precursor polypeptide also contains an 18 amino acid propeptide (amino acid residues 29-46 of SEQ ID NO:2) that, when cleaved, releases the 415 amino acid mature polypeptide (SEQ ID NO:3) that circulates in the blood as a zymogen until activation to FIXa. In addition to the signal peptide and propeptide, the FIX precursor also contains the following segments and domains: a Gla domain (amino acids 47-92 of SEQ ID NO:2, corresponding to amino acids 1-46 of the mature FIX protein set forth in SEQ ID NO:3), epidermal growth factor (EGF)-like domain 1 (EGF1; amino acids 93-129 of SEQ ID NO:2, corresponding to amino acids 47-83 of the mature FIX protein set forth in SEQ ID NO:3), EGF2 (amino acids 130-171 of SEQ ID NO:2, corresponding to amino acids 84-125 of the mature FIX protein set forth in SEQ ID NO:3), a light chain (amino acids 47-191 of SEQ ID NO:2, corresponding to amino acids 1-145 of the mature FIX protein set forth in SEQ ID NO:3), an activation peptide (amino acids 192-226 of SEQ ID NO:2, corresponding to amino acids 146-180 of the mature FIX protein set forth in SEQ ID NO:3), a heavy chain (amino acids 227-461 of SEQ ID NO:2, corresponding to amino acids 181-415 of the mature FIX protein set forth in SEQ ID NO:3) and a serine protease domain (amino acids 227-459 of SEQ ID NO:2, corresponding to amino acids 181-413 of the mature FIX protein set forth in SEQ ID NO:3).

[0292] Like other vitamin K-dependent proteins, such as prothrombin, coagulation factors VII and X, and proteins C, S, and Z, the Gla domain of FIX is a membrane binding motif which, in the presence of calcium ions, interacts with the phospholipid membranes of cells. The vitamin K-dependent proteins require vitamin K for the posttranslational synthesis of γ-carboxyglutamic acid, an amino acid clustered in the Gla domain of these proteins. The FIX Gla domain has 12 glutamic residues, each of which are potential carboxylation sites. Many of them are, therefore, modified by carboxylation to generate γ-carboxyglutamic acid residues. There are a total of eight Ca²⁺ binding sites, of both high and low affinity, in the FIX Gla domain that, when occupied by calcium ions, facilitate correct folding of the Gla domain to expose hydrophobic residues in the FIX polypeptide that are inserted into the lipid bilayer to effect binding to the membrane.

[0293] In addition to the Gla domain, the FIX polypeptide also contains two EGF-like domains. Each EGF-like domain contains six highly conserved cysteine residues that form three disulfide bonds in each domain in the same pattern observed in the EGF protein. The first EGF-like domain (EGF1) is a calcium-binding EGF domain containing a high affinity Ca′ binding site (Rao et al., (1995) Cell 82:131-141) that, when occupied by a calcium ion, contributes to the correct folding of the molecule and promotes biological activity. The second EGF domain (EGF2) does not contain a calcium binding site.

[0294] The serine protease domain, or catalytic domain, of FIX is the domain responsible for the proteolytic activity of FIXa. Like other serine proteases, FIX contains a serine protease catalytic triad composed of H221, D269 and S365 (corresponding to H57, D102 and S195 by chymotrypsin numbering).

[0295] Activation of mature FIX to FIXa is effected by proteolytic cleavage of the R145-A146 bonds and R180-V181 bonds (numbering relative to the mature FIX polypeptide set forth in SEQ ID NO:3), releasing the activation peptide that corresponds to amino acids 146-180 of the mature FIX protein set forth in SEQ ID NO:3. Thus, following activation, FIXa consists of two chains; the light chain and heavy chain. The light chain contains the Gla domain, EGF1 and EGF2 domains, and the heavy chain contains the protease domain. The two chains are held together by a single disulfide bond between C132 and C289.

[0296] 2. FIX Post-Translational Modification

[0297] The Factor IX precursor polypeptide undergoes extensive post-translational modification to become the mature zymogen that is secreted into the blood. Such post-translational modifications include γ-carboxylation, β-hydroxylation, cleavage of the signal peptide and propeptide, O- and N-linked glycosylation, sulfation and phosphorylation. The N-terminal signal peptide directs the polypeptide to the endoplasmic reticulum (ER), after which it is cleaved. Immediately prior to secretion from the cell, the propeptide is cleaved by processing proteases, such as, for example, PACE/furin, that recognize at least two arginine residues within four amino acids prior to the cleavage site.

[0298] A single enzyme, vitamin K-dependent gamma-carboxylase, catalyzes the γ-carboxylation FIX in the ER (Berkner (2000) J. Nutr. 130:1877-1880). In the carboxylation reaction, the γ-carboxylase binds to the FIX propeptide and catalyzes a second carboxylation on the γ-carbon of the glutamic acid residues (i.e., Glu to γ-carboxyglutamyl or Gla) in the Gla domain of the polypeptide. Assuming all glutamic acid residues are γ-carboxylated, FIX contains 12 Gla residues, where the first 10 are at homologous positions of other vitamin K-dependent proteins. The Gla domain of FIX then processively carboxylates all glutamates in the cluster before releasing the substrate (Morris et al. (1995) J. Biol. Chem. 270(51):30491-30498; Berkner (2000) J. Nutr. 130:1877-1880; Stenina et al. (2001) Biochemistry 40:10301-10309).

[0299] FIX also is partially β-hydroxylated. This modification is performed by a dioxygenase, which hydroxylates the β-carbon of D64 (corresponding to the mature FIX polypeptide set forth in SEQ ID NO:3) in EGF1. Approximately one third of human FIX polypeptides are β-hydroxylated. Although D64 contributes to the high affinity Ca²⁺ binding site in the EGF1 domain of FIX, the hydroxylation of this residue does not appear to be necessary for Ca²⁺ binding, nor for biological activity (Derian et al., (1989) J. Biol. Chem. 264:6615-6618; Sunnerhagen et al., (1993) J. Biol. Chem. 268: 23339-23344). Additional post-translational modifications include sulfonation at the tyrosine at position 155, and phosphorylation at the serine residue at position 158. These post-translational modifications of Factor IX have been implicated in contributing to in vivo recovery of FIX (Kaufman (1998) J. Thromb. Haemost. 79:1068-1079; U.S. Pat. No. 7,575,897).

[0300] FIX is N-linked glycosylated at asparagine residues in the activation peptide corresponding to N157 and N167 of the mature FIX polypeptide set forth in SEQ ID NO:3. Post-translational modification also results in the serine residue at position 53 (corresponding to the mature FIX polypeptide set forth in SEQ ID NO:3) having O-linked disaccharides and trisaccharides, while the serine residue at position 61 contains an O-linked tertrasaccharide. (Nishimura et al., (1989) J. Biol. Chem. 264:20320-20325; Harris et al., (1993) Biochemistry 32:6539-6547). Additionally, the threonine residues at amino acid positions 159 and 169 (corresponding to the mature FIX polypeptide set forth in SEQ ID NO:3) are O-glycosylated (Agarwala et al., (1994) Biochemistry 33:5167-5171). The threonine residues at amino acid positions 172 and 179 also may be O-glycosylated.

[0301] 3. FIX Activation

[0302] Factor IX circulates predominantly as a zymogen with minimal proteolytic activity until it is activated by proteolytic cleavage. Activation can be effected by the TF/FVIIa complex or Factor XIa. Activation by TF/FVIIa is through the intrinsic pathway, while activation by FXIa is through the extrinsic pathway, described above. The process of activation appears to be sequential with initial cleavage of the Arg145-Ala146 bond, followed by cleavage of the Arg180-Val181 bond (Schmidt et al. (2003) Trends Cardio. Med. 13:39-45). The proteolytic cleavage releases the activation peptide, forming the two-chain FIXa molecule containing the light chain (corresponding to amino acid positions 1-145 of SEQ ID NO:3) and heavy chain (corresponding to amino acid positions 181-415 of SEQ ID NO:3) held together by a disulfide bond between the two cysteine residues at amino acid positions 132 and 289 (numbering corresponding to the mature FIX polypeptide set forth in SEQ ID NO:3).

[0303] At least two exosites in FX appear to be involved in binding to TF in the TF/FVIIa complex to form the FIX/TF/FVIIa ternary complex (Chen et al., (2002) J. Thromb. Haemost. 88:74-82). Studies indicate that the EGF1 domain of FIX is required for FIX activation by the TF/FVIIa complex. For example, mutation of G48 (relative to the mature FIX polypeptide set forth in SEQ ID NO:3) in the EGF1 domain of FIX reduces its activation by TF/FVIIa (Wu et al., (2000) J. Thromb. Haemost. 84:626-634). Further, the EGF1 domain of FIX has been shown to interact with TF in the TF/FVIIa complex (Zhong et al., (2002) J. Biol. Chem. 277:3622). In contrast, however, the EGF1 domain does not appear to be required for FIX activation by FXIa. The Gla domain also is involved in binding to the TF/FVIIa complex and, therefore, in activation. The Gla domain of FIX interacts with the same region in TF as FX, which also is activated by the TF/FVIIa complex (Kirchhofer et al., (2000) Biochem. 39:7380-7387).

[0304] Following cleavage and release of the activation peptide, a new amino terminus at V181 (corresponding to the mature FIX polypeptide set forth in SEQ ID NO:3; V16 by chymotrypsin numbering) is generated. Release of the activation peptide facilitates a conformational change whereby the amino group of V181 inserts into the active site and forms a salt bridge with the side chain carboxylate of D364. Such a change is required for conversion of the zymogen state to an active state, as the change converts the hydroxyl side chain of 5365 to a reactive species that is able to hydrolyze the cleavage site of its substrate, FX. The activated FIXa polypeptide remains in a zymogen-like conformation until additional conformational changes are induced, such as by binding with FVIIIa, to generate a FIXa polypeptide with maximal catalytic activity.

[0305] 4. FIX Function

[0306] FIX plays an important role in the coagulation pathway and a deficiency or absence of FIX activity leads to hemophilia B. Once activated from FIX to FIXa, FIXa in turn functions to activate the large amounts of FX to FXa that are required for coagulation. To do so, FIXa must first bind to its cofactor, Factor VIIIa, to form the FIXa/FVIIIa complex, also called the intrinsic tenase complex, on the phospholipid surface of the activated platelet. Both the Gla domain and EGF2 domain of FIX are important for stable binding to phospholipids. The FIXa/FVIIIa complex then binds FX to cleave this coagulation factor to form FIXa.

[0307] FIXa is virtually inactive in the absence of its cofactor, FVIIIa, and physiologic substrate, FX. Experimental studies indicate that this can be attributed mainly to the 99-loop. When FIXa is not bound by its cofactor, Y177 locks the 99-loop in an inactive conformation in which the side chains of Y99 and K98 (by chymotrypsin numbering, corresponding to Y266 and K265 of the mature FIX polypeptide set forth in SEQ ID NO:3) impede substrate binding. Binding of FVIIIa to FIXa unlocks and releases this zymogen-like conformation, and FX is then able to associate with the FIXa/FVIIIa complex and rearrange the unlocked 99-loop, subsequently binding to the active site cleft (Sichler et al., (2003) J. Biol. Chem. 278:4121-4126). The binding of FIXa to phospholipids and the presence of Ca²⁺ further enhances the reaction.

[0308] Several models of the FIXa/FVIIIa interaction have been proposed (see, e.g., Autin et al., (2005) J. Thromb. Haemost. 3:2044-2056; Stoilova-McPhie et al., (2002) Blood 99: 1215-1223; Bajaj et al., (2001) J. Biol. Chem. 276:16302-16309; Schmidt et al., (2003) Trends Cardiovasc. Med. 13:39-45). FIXa binds to FVIIIa in an interaction involving more than one domain of the FIXa polypeptide. FVIIIa is a heterodimer composed of three non-covalently associated chains: A1, A2 and A3-C1-C2. A3-C1-C2 also is referred to as the light chain. The protease domain of FIXa appears to interact with the A2 subunit of FVIIIa. Studies indicate that the 293-helix (126-helix by chymotrypsin numbering), 330-helix (162-helix by chymotrypsin numbering) and N346 (N178) by chymotrypsin numbering) of FIXa are involved in the interaction with the A2 subunit of FVIIIa. The EGF1/EGF2 domains of FIXa interact with the A3 subunit of FVIIIa. Further, it is postulated that the Gla domain of FIXa interacts with the C2 domain of FVIIIa. Calcium ions and phospholipids also contribute to binding of FIXa and FVIIIa. For example, the presence of phospholipids increases the binding of FIXa to FVIIIa by approximately 2000-fold (Mathur et al., (1997) J. Biol. Chem. 272(37):23418-23426). Following binding of FX by the FIXa/FVIIIa complex, the protease domain (or catalytic domain) of FIXa is responsible for cleavage of FX at R194-I195 to form FXa.

[0309] The activity of FIXa is regulated by inhibitory molecules, such as the AT-III/heparin complex, as discussed above, and other clearance mechanisms, such as the low-density lipoprotein receptor-related protein (LRP). LRP is a membrane glycoprotein that is expressed on a variety of tissues, including liver, brain, placenta and lung. LRP binds a wide range of proteins and complexes in addition to FIXa, including, but not limited to, apolipoproteins, lipases, proteinases, proteinase-inhibitor complexes, and matrix proteins. The zymogen or inactive form of FIX does not bind LRP. Rather, upon activation, an LRP-binding site is exposed (Neels et al., (2000) Blood 96:3459-3465). This binding site is located in a loop in the protease domain spanning residues 342 to 346 of the mature FIX polypeptide set forth in SEQ ID NO:3 (Rohlena et al., (2003) J. Biol. Chem. 278:9394-9401).

[0310] 5. FIX as a Biopharmaceutical

[0311] Factor IX is integrally involved in the blood coagulation process, where, in its activated form (FIXa), it forms a tenase complex with FVIIIa and activates FX to FXa. FXa, in conjunction with phospholipids, calcium and FVa, converts prothrombin to thrombin, which in turn cleaves fibrinogen to fibrin monomers, thus facilitating the formation of a rigid mesh clot. Many studies have demonstrated the ability of exogenous FIX to promote blood clotting in patients with hemophilia. For example, hemophilia B patients, who are deficient in FIX, can be treated by replacement therapy with exogenous FIX. Early replacement therapies utilized plasma purified FIX, such as therapeutics marketed as MonoNine® Factor IX and Alpha-nine-SD® Factor IX. Plasma purified FIX complex therapeutics also have been used, including Bebulin® VH, a purified concentrate of FIX with FX and low amounts of FVII; Konyne® 80 (Bayer), a purified concentrate of FIX, with FII, FX, and low levels of FVII; PROPLEX® T (Baxter International), a heat treated product prepared from pooled normal human plasma containing FIX with FII, FVII, and FX; and Profilnine SD® (Alpha Therapeutic Corporation). A human recombinant Factor IX (BeneFIX® Coagulation Factor IX (Recombinant), Pfizer) is approved for use in the control and prevention of bleeding episodes in hemophilia B patients, including control and prevention of bleeding in surgical settings. BeneFIX® Coagulation Factor IX (Recombinant) has an amino acid sequence set forth in SEQ ID NO:20, and is identical to the Ala148 allelic form of plasma-derived Factor IX. Thus, compared to the wild-type FIX polypeptide set forth in SEQ ID NO:3, BeneFIX® Coagulation Factor IX (Recombinant) contains a T148A mutation.

[0312] In addition to its use as a procoagulant, inactive forms of FIX, or forms with reduced catalytic activity, can be used as an anticoagulant, such as in the treatment of thrombotic diseases and conditions.

[0313] Typically, FIX is administered intravenously, but also can be administered orally, systemically, buccally, transdermally, intramuscularly and subcutaneously. FIX can be administered once or multiple times. Generally, multiple administrations are used in treatment regimens with FIX to effect coagulation.

[0314] As discussed herein below, modified FIX polypeptides provided herein also can be used in any treatment or pharmaceutical method in which an unmodified or wild-type or other therapeutically active FIX polypeptide is known to be used. In such uses, methods and processes, the modified FIX polypeptides provided herein exhibit improved properties compared to a wild-type or the unmodified FIX polypeptide.

### D. AAV GENE THERAPY VECTORS AND CONSTRUCTS FOR GENE THERAPY

[0315] Provided are compositions containing nucleic acid molecules encoding the modified FIX polypeptides and vectors encoding them that are suitable for gene therapy. Rather than deliver the protein, nucleic acid encoding the protein is administered in vivo, such as systemically or by other route, or ex vivo, such as by removal of cells, including lymphocytes, introduction of the nucleic therein, and reintroduction into the host or a compatible recipient. Modified FIX polypeptides can be administered as nucleic acid molecules encoding modified FIX polypeptides, including ex vivo techniques and direct in vivo expression. Nucleic acids can be delivered to cells and tissues by any method known to those of skill in the art including systemic administration, and also direct injection into the liver parenchyma following compartmentalization (see, U.S. Pat. No. 9,821,114),

[0316] The methods for administering modified FIX polypeptides by expression of encoding nucleic acid molecules include administration of recombinant vectors. Vectors are designed to remain episomal, such as by inclusion of an origin of replication or are designed to integrate into a chromosome in the cell. Modified FIX polypeptides also can be used in ex vivo gene expression therapy using non-viral vectors. For example, cells can be engineered to express a modified FIX polypeptide, such as by integrating a modified FIX polypeptide encoding-nucleic acid into a genomic location, either operatively linked to regulatory sequences or such that it is placed operatively linked to regulatory sequences in a genomic location. Such cells then can be administered locally or systemically to a subject, such as a patient in need of treatment.

[0317] As provided herein, the nucleic acid encoding the modified FIX polypeptides are provided in an AAV vector. The AAV vectors have been generated and selected to have increased tropism for liver cells, whereby upon administration the vector is taken up by hepatocytes and the encoded FIX polypeptide is expressed and secreted into systemic circulation. The nucleic acid encoding the modified FIX polypeptide includes an intron, generally all or a portion of the first intron; this results in increased expression. The nucleic acid also encodes a signal sequence and expression can be under control of liver specific regulatory sequences. The AAV vector employed is designed or generated to have improved properties compared to naturally-occurring serotypes.

[0318] Adeno-associated virus (AAV), a member of the Parvovirus family, is a small non-enveloped, icosahedral virus with single-stranded linear DNA genomes of 4.7 kilobases (kb). In its native state, AAV is replication-defective. It requires a helper virus, typically adenovirus, to provide necessary protein factors for replication. AAV is a small, non-enveloped, non-pathogenic, helper virus dependent single-stranded DNA virus; there are numerous serotypes having varying tissue tropisms and transduction efficiencies. AAV2 and AAV8 have been used to target the liver to achieve long-term expression of encoded therapeutic proteins. In its native state, the AAV life cycle includes a latent phase during which AAV genomes, after infection, are site-specifically integrated into host chromosomes and an infectious phase during which, following either adenovirus or herpes simplex virus infection, the integrated genomes are subsequently rescued, replicated, and packaged into infectious viruses. When vectorized, the viral Rep and Cap genes of AAV are removed and provided in trans during virus production, making the ITRs the only viral DNA that remains. Rep and Cap can be replaced with heterologous nucleic acid encoding a product(s) of interest.

[0319] To produce AAV vectors with altered tropism, AAV vectors encoding variant capsid were generated and screened. DNA encoding capsids from 8 AAV serotypes were shuffled to produce chimeric capsids, which were screened from increased transduction efficiency. The method for production and selection included, for example, the steps of a) generating a library of variant AAV capsid polypeptide genes in which the variant AAV capsid polypeptide genes include a plurality of variant AAV capsid polypeptide genes comprising sequences from more than one non-variant parent capsid polypeptide; b) generating an AAV vector library of replication competent AAV vectors by cloning the variant AAV capsid polypeptide gene library into the AAV vectors; c) screening the library to identify capsid polypeptides that have increased transduction or tropism for a particular tissue or organ; and d) selecting the vectors, and hence the capsids, that have the desired tropism. For the capsids and AAV vectors used herein for encoding the modified FIX, a library was prepared and screened for increased tropism for pancreatic islet cells compared to a non-variant parent capsid polypeptide. Among the candidates tested in our study, 3 chimeric variants exhibit considerably improved transduction capacity of human islet cells—particularly of β cells. In addition, these variants exhibit improved transduction in other cell types in vivo and in vitro. These capsids can be used for various gene therapy applications targeting pancreatic islets, as well as other tissues, such as the liver, which is relevant for other diseases. The selected AAV vectors, and hence, the capsids, also had increased tropism for liver cells. Among the selected chimeric capsids is one designated AAV-KP1 (SEQ ID NO:418). It facilitates transduction of primary human islet cells and human embryonic stem cell-derived β cells with up to 10-fold higher efficiency compared with previously studied best-in-class AAV vectors. This chimeric capsid also transduces mouse and human hepatocytes at very high levels in a humanized chimeric mouse model, thus providing a versatile vector for use in preclinical testing and human clinical trials, and ultimately therapy, for liver-based diseases or diseases for which gene expression in the liver is therapeutic. Among the selected chimeric capsids are those that also exhibit an enhanced neutralization profile as compared to a non-variant parent capsid polypeptide. Among these variant AAV capsid polypeptides are those that exhibit enhanced neutralization profile against pooled human immunoglobulins compared to a non-variant parent capsid polypeptide. These identified and selected capsids includes those designated KP1, KP2, and KP3, whose protein sequences are set forth in SEQ ID NOs:418-420, encoded by nucleic acid molecules whose sequences are set forth in SEQ ID NOs: 421-423, respectively. Particulars of exemplary methods used to generate and screen for the capsids are described in Example 10.

[0320] There are several requisites for effective gene therapy for hemophilia that must be satisfied; the gene therapy vectors and encoded modified FIX polypeptides provided herein satisfy these criteria. Gene therapy for hemophilia should provide sustained clotting factor activity to normalize the phenotype. Normal clotting levels are achieved by activity of at least 40% or 50% activity; normal clotting levels are a goal of gene therapy. Achieving lower levels, such as at least about 12% (or 10%) up to 40% or 50%, provides protection from spontaneous hemarthrosis, and also can be a goal. Even providing sufficient clotting activity (about 5% to 10%) to reduce annual bleeds, from >30 (severe hemophilia), to about 15-20 (moderate), improves quality of life. The gene therapy vectors, which effectively target and transduce hepatocytes, and which encode the modified FIX polypeptides as provided herein, provide high levels of expression of the modified FIX polypeptides, which are at least about 7-10-fold more potent than wild-type FIX. As a result, the doses of the vectors can be substantially lower (at least about 5-, 10- or more fold lower), than prior vectors. Consequently this reduces toxicity, including immunogenicity and inflammatory reactions. The combination of the AAV vectors described herein and the modified FIX polypeptides results in clinically relevant levels of FIX and also reduces viral load, thereby reducing immunogenicity and liver toxicity, compared to other vectors. To achieve expression in the liver from the AAV vectors, the nucleic acid encoding modified FIX provided herein includes an intron, generally a portion of the first intron, following the nucleic acid encoding the signal polypeptides. Dose dependent and stable FIX levels are achieved. The vectors, as exemplified encode the modified FIX with the partial (1.4 kb) intron following the nucleic acid encoding the intron, under control of liver-specific or liver recognized regulatory sequences, flanked by the AAV ITRs, and packaged in the chimeric capsids. As shown in the examples, stable FIX levels, as assessed by FIX antigen levels, are dose dependent and remain stable. These levels are achieved with lower doses than prior vectors, including DJ/8 (also referred to as DJ8). For example, a dose of 8×10¹⁰ viral genomes (vg)/kg, in a mouse study, achieved FIX levels of 20 U/ml, compared with levels of only 4 U/ml achieved with a dose of 2×10¹¹ vg/kg with DJ/8. To achieve the same activity with the Padua mutant (338L) in the same vector required a dosage of 7.4×10¹¹ vg/kg. Bleeding times also were reduced. Thus, the combination of the more potent FIX and the chimeric capsids provides for lower dosing and higher FIX activity.

### E. MODIFIED FIX POLYPEPTIDES

[0321] Modified factor IX polypeptides that can be encoded in the vectors are described in the following sections. In general, as described above, the vectors encode the full length precursor FIX and include the signal sequence, propeptide and mature portions. In the propeptide portion corresponding to residues 28-46 of SEQ ID NO:2, such as between amino acid residues corresponding to 28 and 29, an intron, such as a portion of a FIX intron, is inserted. The vector can include liver-specific regulatory sequences, such as liver-specific promoters and enhancers. These sequences are flanked by AAV ITRs. The FIX polypeptides can be modified by deletions, insertions or replacements (substitutions) of one or more amino acid residues in the primary sequence of a wild-type or unmodified FIX polypeptide. The resulting modified polypeptides exhibit improved properties or activities compared to the unmodified or wild-type FIX polypeptide. For example, the modified factor IX polypeptides, including modified FIXa polypeptides and fragments of modified factor IX and factor IXa polypeptides, can have altered post-translational modification, such as altered glycosylation, including hyperglycosylation, and/or altered phosphorylation or sulfation, such as decreased phosphorylation or sulfation; increased resistance to inhibitors, such as AT-III and/or heparin; decreased binding to LRP; increased catalytic activity; improved pharmacokinetic properties, including decreased clearance and increased serum half-life in vivo; increased coagulant activity; or any combination thereof. Typically, the modified FIX polypeptides exhibit procoagulant activity. FIX polypeptides described herein exhibit increased activity, increased resistance to endogenous inhibitors, such as antithrombin, and increased affinity for FVIIIa. For example, a mature FIX polypeptide that contains the replacements R318Y/R338E/T343R, such as the polypeptide of SEQ ID NO:394, or the same polypeptide in which residue 148 is A (alanine) has about 2.5-fold increased Factor X activation, 21-fold increased resistance to inhibition by antithrombin, and about 8-fold increase in FVIIIa affinity compared to wild-type or BeneFIX® FIX. The combination of these properties provides about 22-fold increase in potency. Exemplary modified FIX polypeptides with these properties are described in the Examples and elsewhere.

[0322] Thus, provided herein are modified FIX polypeptides that exhibit increased coagulant activity upon activation from their single-chain zymogen form and subsequent binding to the cofactor, FVIIIa. Such modified FIX polypeptides can be administered to patients with diseases or conditions characterized by insufficient coagulation, such as, for example, hemophilia B. Nucleic acid encoding other modified FIX known to those of skill in the art that have increased potency also can be packaged in the AAV vectors provided herein and as described herein, including inclusion of all or part of an intron.

[0323] In some examples, the modified FIX polypeptides provided herein exhibit increased resistance to inhibitors, including AT-III, heparin and the AT-III/heparin complex, compared to an unmodified FIX polypeptide. Such modified FIX polypeptides can exhibit increased coagulant activity compared to an unmodified FIX polypeptide. In further examples, the modified factor IX polypeptides provided herein exhibit altered post-translational modification, such as altered glycosylation levels and/or altered types of glycosylation compared to an unmodified FIX polypeptide.

[0324] In some examples, the modified FIX polypeptides provided herein exhibit increased glycosylation compared to an unmodified FIX polypeptide. Thus, provided herein are hyperglycosylated FIX polypeptides. The modified FIX polypeptides can exhibit increased glycosylation by virtue of the incorporation of at least one non-native glycosylation site (i.e., a glycosylation site that is not found in the unmodified or wild-type FIX polypeptide) to which a carbohydrate moiety is linked. Such modified FIX polypeptides can exhibit improved pharmacokinetic properties in vivo, including decreased clearance and increased serum half-life. The introduction of a non-native glycosylation site and subsequent carbohydrate moiety can further improve the activity of the modified FIX polypeptide by sterically hindering the interaction of the FIX polypeptide with one or more other proteins. For example, a glycosylation site can be introduced such that when a carbohydrate moiety is attached at this site, it sterically hinders the interaction of the modified FIX polypeptide with the AT-III/heparin complex, resulting in a polypeptide with increased resistance to AT-III/heparin. This can further reduce clearance of the polypeptide from the circulation. Thus, the effects of the introduction of a new glycosylation site can be several-fold if the carbohydrate moiety also sterically hinders an interaction with another protein(s), such as the AT-III/heparin complex.

[0325] For example, the modified FIX polypeptides provided herein can contain one or more modifications that introduce one or more non-native glycosylation sites compared to the unmodified FIX polypeptide. For example, 1, 2, 3, 4, 5, 6, or more non-native glycosylation sites can be introduced. Glycosylation sites that can be introduced include, but are not limited to, N-glycosylation sites, O-glycosylation sites, or a combination thereof. Thus, when produced in a cell that facilitates glycosylation, or following in vitro glycosylation, the modified FIX polypeptides provided herein can contain 1, 2, 3, 4, 5, 6 or more carbohydrate moieties, each linked to different non-native glycosylation sites, in addition to the carbohydrate moieties linked to the native glycosylation sites (e.g., the native glycosylation sites corresponding to S53, S61, N157, N167, T159, T169, T172 and T179 of the mature FIX polypeptide set forth in SEQ ID NO:3). In a particular example, the modified FIX polypeptides provided herein contain one or more non-native N-glycosylation sites. Thus, the modified FIX polypeptides can exhibit increased levels of N-glycosylation compared to an unmodified FIX polypeptide.

[0326] The modified FIX polypeptides with increased glycosylation also can exhibit, for example, increased solubility, increased AT-III/heparin resistance, increased serum half-life, decreased immunogenicity and/or increased coagulant activity compared to an unmodified FIX polypeptide. Such modified FIX polypeptides can be used in the treatment of bleeding disorders or events, such as hemophilias or injury, where the FIX polypeptides can function to promote blood coagulation. In some instances, the modified FIX polypeptides provided herein that exhibit increased glycosylation also can contain one or more modifications that render the protein inactive, or mostly inactive. Such polypeptides, therefore, can exhibit increased anti-coagulant activity and can be used in the treatment of thrombotic events, conditions or diseases. Typically, however, the modified FIX polypeptides provided herein are procoagulants.

[0327] The modified FIX polypeptides provided herein also can exhibit other activities and/or properties. For example, some of the modified FIX polypeptides contain one or more modifications that increase catalytic activity. In other examples, the modified FIX polypeptides contain one or more modifications that decrease phosphorylation, sulfation, hydroxylation and/or glycosylation. In further examples, the modified FIX polypeptides contain modifications that interfere with the interaction between FIX and LRP. By interrupting the binding of FIX to LRP, the clearance of FIX from circulation can be decreased. Hence, modifications that reduce the binding of FIX to LRP can improve the pharmacokinetic properties of FIX in vivo.

[0328] The modifications, such as amino acid replacements, described herein, such as those modifications that introduce one or more non-native glycosylation sites or increase resistance to inhibitors, can be made in any FIX polypeptide (e.g., unmodified or wild-type FIX polypeptide), including a precursor FIX polypeptide with a sequence set forth in SEQ ID NO:2, a mature FIX polypeptide set forth in SEQ ID NO:3, or in a FIX polypeptide having a sequence of amino acids that exhibits at least 40%, 50%, 60%, 70%, 80%, 90%, 91%, 92%, 93%, 94%, 95%, 96%, 97%, 98%, or 99% sequence identity to the FIX polypeptide set forth in SEQ ID NOs:2 or SEQ ID NO:3. It is understood that reference herein to amino acid residues is with respect to the numbering of the mature FIX polypeptide set forth in SEQ ID NO:3. It is within the level of one of skill in the art to identify a corresponding amino acid residue in another FIX polypeptide of any form, such as a precursor, mature or other active form, by alignment of the sequence of the other FIX polypeptide with SEQ ID NO:3 (see, e.g., FIGS. 3A-D). Any amino acid replacement provided herein can be made at a corresponding amino acid residue that differs or is not the same as the replacement amino acid residue. It is within the level of one of skill in the art to test any resulting modified FIX polypeptide for activity or property as described herein.

[0329] For example, the modifications, such as an amino acid replacement, can be made in any species, allelic or modified variant, such as those described in the art. Allelic variants of FIX include, but are not limited to, T148A and T412P. Any of the amino acid replacements provided herein can be a Factor IX that contains mutations T148A or T412P. For example, the modifications such as any amino acid replacement, can be made in a FIX polypeptide set forth in SEQ ID NO:325 or SEQ ID NO:20. Exemplary species variants for modification herein include, but are not limited to, human and non-human polypeptides including FIX polypeptides from chimpanzee, rhesus macaque, mouse, rat, guinea pig, pig, dog, cat, rabbit, chicken, cow, sheep, frog, zebrafish and Japanese pufferfish FIX polypeptides, whose sequences are set forth in SEQ ID NOs: 4-18, respectively. Modifications in a FIX polypeptide can be made to a FIX polypeptide that also contains other modifications, such as those described in the art, including modifications of the primary sequence and modifications not in the primary sequence of the polypeptide (see, e.g., Section D, which describes exemplary modified FIX polypeptides to which the amino modifications described herein can be made).

[0330] In other examples, the modifications, such as an amino acid replacement, can be made in any active fragment of a FIX polypeptide, such as an active fragment of SEQ ID NO:2 or SEQ ID NO:3, or an active fragment of a species, allelic or modified variant, such as those described in the art. The active fragment contains a contiguous sequence of amino acids containing the catalytically active domain of the polypeptide or a catalytically active portion thereof containing the amino acid modifications, such as amino acid replacements describes herein. The active fragment exhibit at least 30%, 40%, 50%, 60%, 70%, 80%, 90%, 95% or more of the activity of the mature form of the polypeptide, such as the FIX polypeptide set forth in SEQ ID NO:3.

[0331] Modification of FIX polypeptides also include modification of polypeptides that are hybrids of different FIX polypeptides and also synthetic FIX polypeptides prepared recombinantly or synthesized or constructed by other methods known in the art based upon the sequence of known polypeptides. For example, based on alignment of FIX with other coagulation factor family members, including, but not limited to, Factor FVII (FVII) and Factor X (FX), homologous domains among the family members are readily identified. Chimeric variants of FIX polypeptides can be constructed where one or more amino acids or entire domains are replaced in the FIX amino acid sequence using the amino acid sequence of the corresponding family member. Additionally, chimeric FIX polypeptides include those where one or more amino acids or entire domains are replaced in the human FIX amino acid sequence using the amino acid sequence of a different species. Such chimeric proteins can be used as the starting, unmodified FIX polypeptide herein.

[0332] Modifications provided herein of a starting, unmodified reference polypeptide include amino acid replacements or substitution, additions or deletions of amino acids, or any combination thereof. For example, modified FIX polypeptides include those with 1, 2, 3, 4, 5, 6, 7, 8, 9, 10, 11, 12, 13, 14, 15, 16, 17, 18, 19, 20, 30, 40, 50 or more modified positions. In some examples, a modification that is made to alter one activity or property of FIX also can, or instead, affect one more other activities or properties. For example, a modification made to increase resistance to inhibitors also, or instead, can increase catalytic activity. In another example, a modification made to introduce a new glycosylation site also can result in increased resistance to inhibitors and/or increased catalytic activity. In a further example, a modification made to decrease binding to LRP can also, or instead, increase resistance to an inhibitor, such as AT-III/heparin. Thus, although the modifications described herein typically are described in relation to their intended effect on FIX activities or properties, it is understood that any of the modifications described herein, alone or in conjunction with one or more other modifications, can result in changes in other, unpredicted, activities or properties.

[0333] Any modification provided herein can be combined with any other modification known to one of skill in the art. Typically, the resulting modified FIX polypeptide exhibits increased coagulation activity when it is in its two-chain form. The activities or properties that can be altered as a result of modification include, but are not limited to, coagulation or coagulant activity; pro-coagulant activity; proteolytic or catalytic activity such as to effect Factor X (FX) activation; antigenicity (ability to bind to or compete with a polypeptide for binding to an anti-FIX antibody); ability to bind FVIIIa, antithrombin III, heparin and/or factor X; ability to bind to phospholipids; three-dimensional structure; pI; and/or conformation. Included among the modified FIX polypeptides provided herein are those that have increased resistance to antithrombin III (AT-III), increased resistance to heparin, altered glycosylation, such as increased glycosylation, increased catalytic activity, and improved pharmacokinetic properties, such as i) decreased clearance, ii) altered volume of distribution, iii) enhanced in vivo recovery, iv) enhanced total protein exposure in vivo (i.e., AUC), v) increased serum half-life (α-, β-, and/or γ-phase), and/or vi) increased mean resonance time (MRT).

[0334] In some examples, a modification can affect two or more properties or activities of a FIX polypeptide. For example, a modification can result in increased AT-III resistance and increased catalytic activity of the modified FIX polypeptide compared to an unmodified FIX polypeptide. In another example, a modification that introduces a non-native N-glycosylation site and, thus, can increase the glycosylation levels of the polypeptide when expressed in an appropriate cell, such as a mammalian cell, also can result in increased catalytic activity of the modified FIX polypeptide compared to an unmodified FIX polypeptide. Modified FIX polypeptides provided herein can be assayed for each property and activity to identify the range of effects of a modification. Such assays are known in the art and described below. Typically, changes to the properties and/or activities of the modified FIX polypeptides provided herein are made while retaining other FIX activities or properties, such as, but not limited to, binding to FVIIIa and/or binding and activation of FX. Hence, modified FIX polypeptides provided herein retain FVIIIa binding and/or FX binding and activation as compared to a wild-type or starting form of the FIX polypeptide. Typically, such activity is substantially unchanged (less than 1%, 5% or 10% changed) compared to a wild-type or starting protein. In other examples, the activity of a modified FIX polypeptide is increased or is decreased as compared to a wild-type or starting FIX polypeptide. Activity can be assessed in vitro or in vivo and can be compared to the unmodified FIX polypeptide, such as for example, the mature, wild-type native FIX polypeptide (SEQ ID NO:3), the wild-type precursor FIX polypeptide (SEQ ID NO:2), or any other FIX polypeptide known to one of skill in the art that is used as the starting material.

[0335] The modifications provided herein can be made by standard recombinant DNA techniques such as are routine to one of skill in the art. Any method known in the art to effect mutation of any one or more amino acids in a target protein can be employed. Methods include standard site-directed mutagenesis of encoding nucleic acid molecules, or by solid phase polypeptide synthesis methods.

[0336] Other modifications that are or are not in the primary sequence of the polypeptide also can be included in a modified FIX polypeptide, or conjugate thereof, including, but not limited to, the addition of a carbohydrate moiety, the addition of a polyethylene glycol (PEG) moiety, the addition of an Fc domain, a serum albumin and/or other protein. For example, such additional modifications can be made to increase the stability or half-life of the protein.

[0337] The resulting modified FIX polypeptides include those that are single-chain zymogen polypeptides and those that are two-chain zymogen-like polypeptides (i.e., FIXa polypeptides that are not bound to the cofactor, FVIIIa). Any modified FIX polypeptide provided herein that is a single-chain polypeptide can be activated to generate a modified FIXa (i.e., a two-chain form). The activities of a modified FIX polypeptide are typically exhibited in its two-chain form.

[0338] 1. Exemplary Amino Acid Replacements

[0339] Described herein are modified FIX polypeptides for use in the prophylactic subcutaneous methods and regimens provided herein. The FIX polypeptides contain one or more amino acid replacements as described herein below with numbering of residues with respect to the numbering of SEQ ID NO:3. The same amino acid replacements can be made in corresponding amino acid residues in another FIX polypeptide (see, e.g., FIG. 3 for exemplification of identification of corresponding amino acid residues). Corresponding residues are identified by alignment with the FIX of SEQ ID NO:3. The amino acid replacements confer altered glycosylation (e.g., by introduction of non-native glycosylation sites or elimination of native glycosylation sites), increased resistance to AT-III and/or heparin, increased catalytic activity, decreased LRP binding and/or alter posttranslational modifications. The resulting modified FIX polypeptides exhibit improved therapeutic efficacy, for example, due to improved pharmacodynamic or pharmacokinetic activity.

[0340] In particular, non-limiting examples of amino acid replacements in modified FIX polypeptides provided herein below are at any one or more amino acid residues 155, 318, 338, 343, 403 and/or 410 with numbering with respect to the mature FIX polypeptide set forth in SEQ ID NO:3 (corresponding to amino acid residues [155], 150, 170, 175, 233 and/or 240, respectively, by chymotrypsin numbering). The residues corresponding to any of 155, 318, 338, 343, 403 and/or 410 in other FIX polypeptides can be determined by sequence alignment with SEQ ID NO:3 (see, e.g., FIGS. 3A-3D). It is understood that the amino acid replacements provided herein at any of amino acid residues 155, 318, 338, 343, 403 and/or 410 with numbering with respect to SEQ ID NO:3 can be made in other FIX polypeptides as described elsewhere herein. It is also understood that residues corresponding to any of the other amino acid replacements provided herein also can be identified in other FIX polypeptides as exemplified herein (see, e.g., FIGS. 3A-3D).

[0341] In particular, the FIX polypeptides for use in the methods and regimens provided herein are amino acid replacement of tyrosine at amino acid residue Y155 (Y155F), Y155L, Y155H, R318A, R318Y, R318E, R318F, R318W, R318D, R318I, R318K, R318L, R318M, R318N, R318S, R318V, R318Y, R338A, R338E, T343R, T343E, T343D, T343F, T343I, T343K, T343L, T343M, T343Q, T343S, T343V, T343W, T343Y, R403A, R403E, E410Q, E410S, E410N, E410A, E410D, or a conservative amino acid replacement (see, e.g., Table 4). In some examples, the amino acid replacement is Y155F, R318Y, R318E, R338E, T343R, R403E and/or E410N or conservative amino acid replacements thereof.

[0342] For example, as shown by the data herein, amino acid replacement at position R318 with reference to SEQ ID NO:3 (150 by chymotrypsin numbering) confers resistance to inhibition by the AT-III/heparin complex. An amino acid replacement at position R338 (R170 by chymotrypsin numbering) also confers resistance to inhibition by the AT-III/heparin complex. In this respect, the amino acid position R338 is the site of a natural mutation (R170L) that has been reported to exhibit 5-10 fold enhanced clotting activity in an in vitro clotting assay (International Application Pub. No. WO 2010/029178). The assay as described was performed with conditioned media rather than purified protein and the protein concentration was measured using an ELISA assay. Consequently, these data could reflect a higher fraction of active material in the R338L (R170L) preparation as compared to the wild-type comparator preparation or a higher level of contaminants that are active in a clotting assay. Nevertheless, as shown herein, there is a 3.5- to 4-fold increased efficiency for FX activation by variants containing A, E and L at position 338 (170). As found herein, the R338E mutation, in addition, exhibited an approximately 88-fold resistance to inhibition by the heparin/AT-III complex as well as 2-fold enhanced binding to the co-factor, FVIIIa.

[0343] A 4 amino acid thrombin loop swap mutation into FIX, from positions 342-345 (174-177 by chymotrypsin numbering) has been reported to reduce the binding of FIXa to sLRP (see, Rohlena et al., (2003) J. Biol. Chem. 9394-9401). Mutation of the residue at position T343 (T175 by chymotrypsin numbering) did not confer any significant effect on the pharmacokinetic (PK) properties of FIX. It is found herein that the mutation T343R (T175R by chymotrypsin numbering), however, increases the catalytic efficacy for activation of FX by a factor of about 3.1, produces an approximately 5.6-fold resistance to the heparin/AT-III complex, and increases the affinity for FVIIIa by a factor of approximately 1.6-fold.

[0344] Also as shown herein, mutations at position R403 (R233 by chymotrypsin numbering) confer resistance to inhibition by the heparin/AT-III complex. Mutations at position E410 (E240 by chymotrypsin numbering), such as E410N, produce a significant, heretofore unobserved, 1.3- to 2.8-fold increase in the catalytic efficacy for activation of FX.

[0345] Also, as shown therein, there is a synergy in mutations at R338 and T343 (R170 and T175 by chymotrypsin numbering), particularly between R338E and T343R in enhanced binding to the co-factor FVIII. Synergy also was observed between mutations at positions R338 and E410 (R170 and E240 by chymotrypsin numbering), particularly R338E and E410N. The two double mutants, exemplified herein, R338E/T343R and R338E/E410N exhibit 24- to 28-fold improved binding to FVIIIa while each of the single mutations alone enhance binding by 1.6-2.2-fold each.

[0346] Other exemplary amino acid replacements in a FIX polypeptide provided herein found to confer an altered property or activity as described below can be at any amino acid residue from among 1, 5, 53, 61, 64, 85, 103, 104, 105, 106, 108, 148, 157, 158, 159, 167, 169, 172, 179, 202, 203, 204, 205, 228, 239, 241, 243, 247, 249, 251, 257, 259, 260, 262, 284, 293, 312, 314, 315, 316, 317, 319, 320, 321, 333, 342, 345, 346, 392, 394, 400, 412, or 413, with reference to SEQ ID NO:3, or at a corresponding amino acid residue. For example, exemplary amino acid replacements in a FIX polypeptide provided herein also include, but are not limited to, Y1N, K5A, S53A, S61A, S61C, S61D, S61E, S61F, S61G, S61I, S61K, S61L, S61P, S61R, S61V, S61W, S61Y, D64A, D64C, D64F, D64H, D641, D64L, D64M, D64N, D64P, D64R, D64S, D64T, D64W, D85N, A103N, D104N, N105S, N105T, K106N, K106S, K106T, V108S, V108T, T148A, N157D, N157E, N157F, N157I, N157K, N157L, N157M, N157Q, N157R, N157V, N157W, N157Y, S158A, S158D, S158E, S158F, S158G, S158I, S158K, S158L, S158M, S158R, S158V, S158W, S158Y, T159A, N167D, N167Q, N167E, N167F, N167G, N167H, N167I, N167K, N167L, N167M, N167P, N167R, N167V, N167W, N167Y, T169A, T169D, T169E, T169F, T169G, T169I, T169K, T169L, T169M, T169P, T169R, T169S, T169V, T169W, T169Y, T172A, T172D, T172E, T172F, T172G, T172I, T172K, T172L, T172M, T172P, T172R, T172S, T172V, T172W, T172Y, T179A, V202M, V202Y, D203N, D203M, D203Y, D203F, D203H, D203I, D203K, D203L, D203R, D203V, D203W, A204M, A204Y, A204F, A204I, A204W, F205S, F205T, K228N, E239A, E239S, E239R, E239K, E239D, E239F, E239I, E239L, E239M, E239N, E239T, E239V, E239W, E239Y, T241N, H243S, H243T, K247N, N249S, N249T, I251S, H257F, H257E, H257D, H257I, H257K, H257L, H257M, H257Q, H257R, H257S, H257V, H257W, H257Y, N260S, A262S, A262T, Y284N, K293E, K293A, R312A, R312Y, R312L, R312C, R312D, R312E, R312F, R312I, R312K, R312L, R312M, R312P, R312Q, R312S, R312T, R312V, R312W, R312Y, F314N, H315S, K316M, K316D, K316F, K316H, K316I, K316L, K316M, K316R, K316S, K316T, K316V, K316W, K316Y, G317N, S319N, A320S, L321N, L321S, L321T, R333A, R333E, F342I, F342D, F342E, F342K, F342L, F342M, F342S, F342T, F342V, F342W, F342Y, Y345A, Y345T, N346D, N346Y, N346E, N346F, N346H, N346I, N346K, N346L, N346M, N346Q, N346R, N346T, N346V, N346W, K392N, K394S, K394T, K400A, K400E, K400C, K400D, K400F, K400G, K400L, K400M, K400P, K400S, K400T, K400V, K400Y, T412A, T412V, T412C, T412D, T412E, T412F, T412G, T412I, T412M, T412P, T412W, T412Y, and K413N, in a mature FIX polypeptide having a sequence set forth in SEQ ID NO:3, or the same replacement in a corresponding amino acid residue position.

[0347] For example, exemplary properties and activities that are altered by the modifications (e.g., amino acid replacements) provided herein are described as follows.

[0348] a. Altered Glycosylation

[0349] The modified Factor IX polypeptides provided herein can exhibit altered glycosylation levels and/or altered types of glycosylation compared to an unmodified FIX polypeptide. In some examples, the modified FIX polypeptides provided herein exhibit increased glycosylation compared to an unmodified FIX polypeptide. Thus, among the modified FIX polypeptides described herein are hyperglycosylated FIX polypeptides.

[0350] i. Advantages of Glycosylation

[0351] Many mammalian proteins are glycosylated with variable numbers of carbohydrate chains, each of which can have differing carbohydrate structures. Such carbohydrates can have an important role in the stability, solubility, activity, serum half-life and immunogenicity of the protein. Thus, the properties and activities of a protein can be altered by modulating the amount and/or type of glycosylation. For example, glycosylation can increase serum-half-life of polypeptides by increasing the stability, solubility, and reducing the immunogenicity of a protein. This is of particular interest for therapeutic polypeptides, where increased solubility, serum half-life and stability of the therapeutic polypeptide can result in increased therapeutic efficacy.

[0352] Oligosaccharides are important in intra- and inter-cell events such as a recognition, signaling and adhesion. Carbohydrates also assist in the folding of secreted proteins. Glycosylation sites provide a site for attachment of monosaccharides and oligosaccharides to a polypeptide via a glycosidic linkage, such that when the polypeptide is produced, for example, in a eukaryotic cell capable of glycosylation, it is glycosylated. There are several types of protein glycosylation. N-linked and O-linked glycosylation are the major classes, in which an asparagine residue, or a serine or threonine residue, respectively, is modified. Other types of glycans include glycosaminoglycans and glycosylphophatidylinositol (GPI)-anchors. Glycosaminoglycans are attached to the hydroxy oxygen of serine, while GPI anchors attach a protein to a hydrophobic lipid anchor, via a glycan chain. C-glycosylation also can occur at the consensus sequence Trp-X-X-Trp, where the indol side chain of the first tryptophan residue in the sequences is modified with an α-mannopyranosyl group (Furmanek et al., (2000) Acta Biochim. Pol. 47:781-789).

[0353] The presence of a potential glycosylation site does not, however, ensure that the site will be glycosylated during post-translational processing in the ER. The level of glycosylation can vary at any given site, as can the glycan structures. The differences in levels and types of glycosylation at particular sites can be attributed, at least in part, to the sequence context and secondary structure around the potential glycosylation site.

[0354] O-linked glycosylation involves the attachment of the sugar units, such as N-acetylgalactosamine, via the hydroxyl group of serine, threonine, hydroxylysine or hydroxyproline residues. It is initiated by the attachment of one monosaccharide, following which others are added to form a mature O-glycan structure. There is no known motif for O-glycosylation, although O-glycosylation is more probable in sequences with a high proportion of serine, threonine and proline residues. Further, secondary structural elements such as an extended β turn also may promote O-glycosylation. O-glycosylation lacks a common core structure. Instead, several types of glycans can be attached at the selected O-glycosylation sites, including O—N-acetylgalactosamine (O-GalNAc), O—N-acetylglucosamine (O-GlcNAc), O-fucose and O-glucose.

[0355] In contrast to O-glycosylation, the N-linked glycosylation consensus sequence motif is well characterized. During N-linked glycosylation, a 14-residue oligosaccharide is transferred to the asparagine residue in the Asn-X-Ser/Thr/Cys consensus motif, where X is any amino acid except Pro. Glycosyltransferases then enzymatically trim the saccharide and attach additional sugar units to the mannose residues. The sequence adjacent to the consensus motif also can affect whether or not glycosylation occurs at the consensus sequence. Thus, the presence of the Asn-X-Ser/Thr/Cys consensus sequence is required but not necessarily sufficient for N-linked glycosylation to occur. In some instances, changes to the adjacent sequence results in glycosylation at the consensus motif where there previously was none (Elliot et al., (2004) J. Biol. Chem. 279:16854-16862).

[0356] N-linked oligosaccharides share a common core structure of GlcNAc₂Man₃. There are three major types of N-linked saccharides in mammals: high-mannose oligosaccharides, complex oligosaccharides and hybrid oligosaccharides. High-mannose oligosaccharides essentially contain two N-acetylglucosamines with several mannose residues. In some instances, the final N-linked high-mannose oligosaccharide contains as many mannose residues as the precursor oligosaccharide before it is attached to the protein. Complex oligosaccharides can contain almost any number of mannose, N-acetylglucosamines and fucose saccharides, including more than the two N-acetylglucosamines in the core structure.

[0357] Glycosylation can increase the stability of proteins by reducing the proteolysis of the protein and can protect the protein from thermal degradation, exposure to denaturing agents, damage by oxygen free radicals, and changes in pH. Glycosylation also can allow the target protein to evade clearance mechanisms that can involve binding to other proteins, including cell surface receptors. The sialic acid component of carbohydrate in particular can enhance the serum half-life of proteins. Sialic acid moieties are highly hydrophilic and can shield hydrophobic residues of the target protein. This increases solubility and decreases aggregation and precipitation of the protein. Decreased aggregation reduces the likelihood of an immune response being raised to the protein. Further, carbohydrates can shield immunogenic sequences from the immune system, and the volume of space occupied by the carbohydrate moieties can decrease the available surface area that is surveyed by the immune system. These properties can lead to the reduction in immunogenicity of the target protein.

[0358] Modifying the level and/or type of glycosylation of a therapeutic polypeptide can affect the in vivo activity of the polypeptide. By increasing the level of glycosylation, recombinant polypeptides can be made more stable with increased serum half-life, reduced serum clearance and reduced immunogenicity. This can increase the in vivo activity of the polypeptide, resulting in reduced doses and/or frequency of dosing to achieve a comparable therapeutic effect. For example, a hyperglycosylated form of recombinant human erythropoietin (rHuEPO), called Darbepoetin alfa (DA), has increased in vivo activity and prolonged duration of action. The increased carbohydrate and sialic acid content of the hyperglycosylated DA polypeptide results in a serum half-life that is three times greater than that of the unmodified rHuEPO. This increased serum half-life results in increased bioavailability and reduced clearance, which can allow for less frequent dosing and/or lower dosages, with associated increased convenience for the patient, reduced risk of adverse effects and improved patient compliance.

[0359] ii. Exemplary Modified FIX Polypeptides with Altered Glycosylation

[0360] Provided herein are modified FIX polypeptides that are modified to exhibit altered glycosylation compared to an unmodified FIX polypeptide. The modified FIX polypeptides can exhibit increased or decreased glycosylation, such as by the incorporation of non-native glycosylation sites or the deletion of native glycosylation sites, respectively. For example, the modified FIX polypeptides can contain 1, 2, 3, 4 or more non-native N-glycosylation sites. The non-native N-glycosylation sites can be introduced by amino acid replacement(s) (or substitution(s)), insertion(s) or deletion(s), or any combination thereof, wherein the amino acid replacement(s), insertion(s) and/or deletion(s) result in the establishment of the glycosylation motif Asn-Xaa-Ser/Thr/Cys, where Xaa is not proline. In other examples, the modified FIX polypeptides provided herein can have a reduced number of glycosylation sites compared to an unmodified FIX polypeptide, typically resulting in a reduced level of glycosylation compared to the unmodified FIX polypeptide. In further examples, the modified FIX polypeptides exhibit the same levels of glycosylation as wild-type FIX, but exhibit different types of glycosylation. For example, a modified FIX polypeptide can exhibit the same number of glycosylation sites and the same level of glycosylation as an unmodified FIX polypeptide, but can have different types of glycosylation, such as, for example, different relative amounts of N- and O-glycosylation compared to an unmodified FIX polypeptide.

[0361] (a) Introduction of Non-Native Glycosylation Site(s)

[0362] In particular examples, a non-native N-glycosylation site is introduced by amino acid replacement. In some instances, the creation of a non-native N-glycosylation site by amino acid replacement requires only one amino acid replacement. For example, if the unmodified FIX polypeptide contains a Gly-Ala-Ser sequence, then an N-glycosylation site can be created by a single amino acid substitution of the glycine with an asparagine, to create an Asn-Ala-Ser N-glycosylation motif. In another example, if the unmodified FIX polypeptide contains an Asn-Trp-Met sequence, then an N-glycosylation site can be created by a single amino acid substitution of the methionine with a cysteine (or threonine or serine). In other instances, the creation of a non-native N-glycosylation site by amino acid replacement requires more than one amino acid replacement. For example, if the unmodified FIX polypeptide contains a Gly-Arg-Phe sequence, then an N-glycosylation site can be created by two amino acid replacements: an amino acid substitution of the glycine with an asparagine, and an amino acid substitution of the phenylalanine with a cysteine (or threonine or serine), to create an Asn-Arg-Ser/Thr/Cys N-glycosylation motif. Thus, one of skill in the art can introduce one or more non-native N-glycosylation sites at any position in the FIX polypeptide.

[0363] The position at which a non-native glycosylation site is introduced into the FIX polypeptide to generate the modified FIX polypeptides provided herein is typically selected so that any carbohydrate moieties linked at that site do not adversely interfere with the structure, function and/or procoagulant activity of the FIX polypeptide, or that the amino acid modification(s) made to the polypeptide to introduce the non-native glycosylation site do not adversely interfere with the structure, function or activity of the FIX polypeptide. Thus, a non-native glycosylation site can be introduced into any position in a FIX polypeptide provided the resulting modified FIX polypeptide retains at least one activity of the wild type or unmodified FIX polypeptide. Conversely, one or more non-native glycosylation sites can be introduced into the modified FIX polypeptide at sites that may be involved in the interaction of FIX with an inhibitory molecule. The carbohydrate moiety that is linked to the new glycosylation site can sterically hinder the interaction between the inhibitory molecule and the modified FIX. Such steric hindrance can result in a modified FIX polypeptide with increased coagulant activity. For example, a carbohydrate moiety that is linked to a non-native glycosylation site contained in the modified FIX polypeptides provided herein can sterically hinder the interaction of the modified FIX with the AT-III/heparin complex. This can result in increased resistance of the modified FIX polypeptide to the inhibitory effects of AT-III/heparin.

[0364] Thus, a non-native glycosylation site can be introduced into the Gla domain, EGF1 domain, EGF2 domain, activation peptide and/or the protease domain, provided the resulting modified FIX polypeptide retains at least one activity of the wild type or unmodified FIX polypeptide. In other examples, a non-native glycosylation site is introduced into the EGF2 domain or the protease domain. The resulting modified FIX polypeptide retains at least one activity of the unmodified FIX polypeptide. In some examples, the modified FIX polypeptide retains at least 5%, 10%, 20%, 30%, 40%, 50%, 60%, 70%, 80%, 90%, 95% or more of the catalytic activity of the unmodified FIX polypeptide. In other examples, the modified FIX polypeptide retains at least 5%, 10%, 20%, 30%, 40%, 50%, 60%, 70%, 80%, 90%, 95% or more of the binding activity for FX of the unmodified FIX polypeptide. In other examples, the modified FIX polypeptide retains at least 5%, 10%, 20%, 30%, 40%, 50%, 60%, 70%, 80%, 90%, 95% or more of the binding activity for FVIIIa of the unmodified FIX polypeptide. In some assays and/or under some conditions, the modified FIX polypeptides can exhibit increased activity compared with the unmodified FIX protein (e.g., pharmacodynamic activity in vivo, and/or catalytic activity in the presence of ATIII/heparin or plasma).

[0365] Table 5 provides non-limiting examples of exemplary amino acid replacements, corresponding to amino acid positions of a mature FIX polypeptide as set forth in SEQ ID NO:3, that are included in a modified FIX polypeptide to increase glycosylation levels by introducing a non-native N-glycosylation site. In reference to such mutations, the first amino acid (one-letter abbreviation) corresponds to the amino acid that is replaced, the number corresponds to the position in the mature FIX polypeptide sequence with reference to SEQ ID NO:3, and the second amino acid (one-letter abbreviation) corresponds to the amino acid selected that replaces the first amino acid at that position. The amino acid positions for mutation also are referred to by the chymotrypsin numbering scheme where appropriate (i.e., when the mutation is located within the FIX protease domain). In instances where a modified amino acid position does not have a corresponding chymotrypsin number (i.e., is not within amino acid positions 181 to 415 corresponding to a mature FIX polypeptide set forth in SEQ ID NO:3, and is not set forth in Table 1, above), the position is denoted in brackets using mature FIX numbering. For example, A103N does not have a corresponding chymotrypsin number and is set forth as A[103]N when referring to chymotrypsin numbering. In Table 5 below, the sequence identifier (SEQ ID NO) is identified in which exemplary amino acid sequences of the modified FIX polypeptide are set forth. Also identified in Table 5 are the positions of the non-native glycosylation sites generated by the modifications.

[0366] In some instances, only one amino acid replacement is required to create a non-native N-glycosylation site. For example, the aspartic acid (Asp, D) at position 85 (corresponding to the mature FIX polypeptide set forth in SEQ ID NO:3) can be replaced with an asparagine (Asn, N) to generate a non-native glycosylation site in the EGF2 domain at amino acid position 85 in the resulting modified FIX polypeptide. In another example, the isoleucine (Ile, I) at position 251 (corresponding to the mature FIX polypeptide set forth in SEQ ID NO:3) can be replaced with a serine (Ser, S) to generate a non-native N-glycosylation site in the protease domain at amino acid position 249 in the resulting modified FIX polypeptide. In other instances, two amino acid replacements are required to create a new glycosylation site. For example, the alanine (Ala, A) at position 103 (based on numbering of a mature FIX set forth in SEQ ID NO:3) can be replaced with an asparagine (Asn, N), and the asparagine at position 105 can be replaced with a serine (Ser, S) to create a non-native N-glycosylation site in the EGF2 domain at amino acid position 103 in the resulting modified FIX polypeptide. In another example, the threonine (Thr, T) at position 241 is replaced with an asparagine and the histidine (His, H) at position 243 is replaced with a serine to create a non-native N-glycosylation site in the protease domain at amino acid position 243.

TABLE 5

| | | Non-native | Non-native | |
|---|---|---|---|---|
| | | glycosylation | glycosylation | |
| Modification | Modification | site | site | SEQ |
| (mature FIX | (chymotrypsin | (mature FIX | (chymotrypsin | ID |
| numbering) | numbering) | numbering) | numbering) | NO. |
| A103N/N105S | A[103]N/N[105]S | N103 | N[103] | 77 |
| D104N/K106S | D[104]N/K[106]S | N104 | N[104] | 78 |
| K106N/V108S | K[106]N/V[108]S | N106 | N[106] | 79 |
| D85N | D[85]N | N85 | N[85] | 80 |
| D203N/F205T | D39N/F41T | N203 | N39 | 99 |
| K228N | K63N | N228 | N63 | 101 |
| I251S | I86S | N249 | N84 | 103 |
| A262S | A95bS | N260 | N95 | 106 |
| K413N | K243N | N413 | N243 | 107 |
| E410N | E240N | N410 | N240 | 108 |
| E239N | E74N | N239 | N74 | 109 |
| T241N/H243S | T76N/H78S | N241 | N76 | 110 |
| K247N/N249S | K82N/N84S | N247 | N82 | 111 |
| L321N | L153N | N321 | N153 | 112 |
| K392N/K394S | K222N/K224S | N392 | N222 | 114 |
| N260S | N95S | N258 | N93 | 116 |
| S319N/L321S | S151N/L153S | N319 | N151 | 115 |
| Y284N | Y117N | N284 | N117 | 117 |
| G317N | G149N | N317 | N149 | 118 |
| R318N/A320S | R150N/A152S | N318 | N150 | 119 |
| F314N/K316S | F145N/K148S | N314 | N145 | 177 |

[0367] The modified FIX polypeptides provided herein can contain modifications that result in the introduction of two or more non-native N-glycosylation sites. For example, the modifications set forth in Table 5 can be combined, resulting in a modified FIX polypeptide that contains 2, 3, 4, 5, 6 or more non-native N-glycosylation sites. Any two or more of the modifications set forth in Table 5 can be combined. For example, included among the modified FIX polypeptides provided herein are modified FIX polypeptides that contain the amino acid substitutions D104N/K106S/K228N, resulting in a FIX polypeptide with two non-native glycosylation sites at amino acid positions 104 and 228, respectively (numbering corresponding to the mature FIX polypeptide set forth in SEQ ID NO:3). In another example, a modified FIX polypeptide can contain amino acid substitutions D85N/K247N/N249S/K392N/K394S, resulting in a FIX polypeptide with three non-native glycosylation sites at amino acid positions 85, 247 and 392, respectively (numbering corresponding to the mature FIX polypeptide set forth in SEQ ID NO:3). Table 6 sets forth exemplary FIX polypeptides having two or more non-native N-glycosylation sites.

TABLE 6

| | | Non-native | Non-native | |
|---|---|---|---|---|
| | | glycosylation | glycosylation | |
| Modifications | Modifications | site | site | SEQ |
| (mature FIX | (chymotrypsin | (mature FIX | (chymotrypsin | ID |
| numbering) | numbering) | numbering) | numbering) | NO. |
| D85N/I251S | D[85]N/I86S | N85 and N149 | N[85] and N84 | 104 |
| D85N/D203N/F205T | D[85]N/D39N/F41T | N85 and N203 | N[85] and N39 | 100 |
| D85N/K228N | D[85]N/K63N | N85 and N228 | N[85] and N63 | 102 |
| D85N/D104N/ | D[85]N/D[104N]/ | N85, N104 and | N[85], N[104] | 105 |
| K106S/I251S | K[106]6/I86S | N249 | and N84 | |
| A103N/N105S/ | A[103]N/N[105]S/ | N103 and N247 | N[103] and N82 | 178 |
| K247N/N249S | K82N/N84S | | | |
| D104N/K106S/ | D[104]N/K[106]S/ | N104 and N247 | N[104] and N82 | 179 |
| K247N/N249S | K82N/N84S | | | |
| K228N/I251S | K63N/I86S | N228 and N249 | N63 and N84 | 180 |
| A103N/N105S/I251S | A[103]N/N[105]S/I86S | N103 and N249 | N[103] and N84 | 181 |
| D104N/K106S/I251S | D[104]N/K[106]S/I86S | N104 and N249 | N[104] and N84 | 182 |
| K228N/K247N/N249S | K63N/K82N/N84S | N228 and N247 | N63 and N82 | 183 |
| K228N/K247N/N249S/ | K63N/K82N/N84S/ | N228, N247 | N63, N82 and | 184 |
| D104N/K106S | D[104]N/K[106]S | and N104, | N[104] | |
| D104N/K106S/N260S | D[104]N/K[106]S/N95S | N104 and N258 | N[104] and N93 | 185 |

[0368] The modified FIX polypeptides provided herein can contain one or more non-native glycosylation sites, such as one or more non-native N-glycosylation sites. Thus, when expressed in a cell that facilitates glycosylation, or when glycosylated using in vitro techniques well known in the art, the modified FIX polypeptides can exhibit increased levels of glycosylation compared to an unmodified FIX polypeptide. The level of glycosylation can be increased by at least or at least about 1%, 2%, 3%, 4%, 5%, 6%, 7%, 8%, 9%, 10%, 20%, 30%, 40%, 50%, 60%, 70%, 80%, 90%, 100%, 200%, 300%, 400%, 500%, or more compared to the level of glycosylation of unmodified or wild-type FIX polypeptide.

[0369] The modifications described herein to introduce one or more non-native glycosylation sites can be combined with any other mutation described herein or known in the art. Typically, the resulting modified FIX polypeptide exhibits increased coagulant activity compared to an unmodified FIX polypeptide. For example, one or more modifications that introduce one or more non-native glycosylation sites can be combined with modification(s) that increase resistance to an inhibitor, such as AT-III and/or heparin, increase catalytic activity, increase intrinsic activity, increase binding to phospholipids, decrease binding to LRP and/or improve pharmacokinetic and/or pharmacodynamic properties.

[0370] The modified FIX polypeptides provided herein that contain one or more non-native glycosylation sites and have altered glycosylation, such as increased levels of glycosylation, retain at least one activity of FIX, such as, for example, catalytic activity for its substrate, FX. Typically, the modified FIX polypeptides provided herein retain at least or at least about 5%, 10%, 20%, 30%, 40%, 50%, 60%, 70%, 80%, 90%, 95% or more of the catalytic activity exhibited by an unmodified FIX polypeptide. Increased levels of glycosylation can improve the pharmacokinetic properties of the modified FIX polypeptides by endowing the variant with one or more of the following properties: i) decreased clearance, ii) altered volume of distribution, iii) enhanced in vivo recovery, iv) enhanced total protein exposure in vivo (i.e., AUC), v) increased serum half-life (α, β, and/or γ phase), and/or vi) increased mean resonance time (MRT) compared to an unmodified FIX. The coagulant activity of the modified FIX polypeptides with altered glycosylation can be increased by at least or at least about 1%, 2%, 3%, 4%, 5%, 6%, 7%, 8%, 9%, 10%, 20%, 30%, 40%, 50%, 60%, 70%, 80%, 90%, 100%, 200%, 300%, 400%, 500%, or more compared to the coagulation activity of unmodified or wild-type FIX polypeptide either in vivo or in vitro.

[0371] (b) Elimination of Native Glycosylation Sites

[0372] The modified FIX polypeptides provided herein can have a reduced number of glycosylation sites compared to an unmodified FIX polypeptide. Typically, a reduction in the number of glycosylation sites results in a reduced level of glycosylation compared to the unmodified FIX polypeptide. The native glycosylation sites that can be removed include, for example, native N-glycosylation sites at amino acid positions corresponding to positions 157 and 167 of the mature FIX set forth in SEQ ID NO:3, and native O-glycosylation sites at amino acid positions corresponding to positions 53, 61, 159, 169, 172 and 179 of the mature FIX set forth in SEQ ID NO:3.

[0373] Any one or more native glycosylation sites can be removed by amino acid replacement(s), insertion(s) or deletion(s), or any combination thereof. For example, an amino acid replacement, deletion and/or insertion can be made to destroy the Asn/Xaa/Ser/Thr/Cys motif (where Xaa is not a proline), thereby removing an N-glycosylation site at position 157 or 167. In other examples, O-glycosylation sites are removed, such as by amino acid replacement or deletion of the serine residues at positions 53 or 61, or amino acid replacement or deletion of the threonine residues at positions 159 or 169. The resulting modified FIX polypeptide retains at least one activity of the unmodified FIX polypeptide. In some examples, the modified FIX polypeptide retains at least 5%, 10%, 20%, 30%, 40%, 50%, 60%, 70%, 80%, 90%, 95% or more of the catalytic activity of the unmodified FIX polypeptide. In other examples, the modified FIX polypeptide retains at least 5%, 10%, 20%, 30%, 40%, 50%, 60%, 70%, 80%, 90%, 95% or more of the binding activity for FX of the unmodified FIX polypeptide. In other examples, the modified FIX polypeptide retains at least 5%, 10%, 20%, 30%, 40%, 50%, 60%, 70%, 80%, 90%, 95% or more of the binding activity for FVIIIa of the unmodified FIX polypeptide. In some assays and/or under some conditions, the modified FIX polypeptides can exhibit enhanced properties compared with unmodified FIX (e.g., including but not limited to, increased in vivo recovery, increased AUC in vivo, and/or decreased clearance in vivo).

[0374] Table 7 provides non-limiting examples of exemplary amino acid replacements, corresponding to amino acid positions of a mature FIX polypeptide as set forth in SEQ ID NO:3, that are included in a modified FIX polypeptide to decrease glycosylation levels by removing or eliminating a native N-glycosylation site. In Table 7 below, the sequence identifier (SEQ ID NO) is identified in which exemplary amino acid sequences of the modified FIX polypeptide are set forth.

TABLE 7

| Mutation | Mutation | SEQ |
|---|---|---|
| (Mature FIX | (Chymotrypsin | ID |
| Numbering) | Numbering) | NO. |
| S53A | S[53]A | 88 |
| S61A | S[61]A | 87 |
| N157D | N[157]D | 75 |
| N157Q | N[157]Q | 98 |
| T159A | T[159]A | 89 |
| N167D | N[167]D | 85 |
| N167Q | N[167]Q | 86 |
| T169A | T[169]A | 90 |
| T172A | T[172]A | 91 |
| T179A | T[179]A | 92 |

[0375] The modifications described herein to eliminate one or more native glycosylation sites can be combined with any other mutation described herein or known in the art. Typically, the resulting modified FIX polypeptide exhibits increased coagulant activity compared to an unmodified FIX polypeptide. For example, one or more modifications that eliminate one or more native glycosylation sites can be combined with modification(s) that introduce a non-native glycosylation site, increase resistance to an inhibitor, such as AT-III and/or heparin, increase catalytic activity, increase intrinsic activity, increase binding to phospholipids, or improve pharmacokinetic and/or pharmacodynamic properties.

[0376] The modified FIX polypeptides provided herein that eliminate one or more native glycosylation sites retain at least one activity of FIX, such as, for example, catalytic activity for its substrate, FX. Typically, the modified FIX polypeptides provided herein retain at least or at least about 5%, 10%, 20%, 30%, 40%, 50%, 60%, 70%, 80%, 90%, 95% or more of the catalytic activity exhibited by an unmodified FIX polypeptide. In some instances, the coagulant activity of the modified FIX polypeptides with altered glycosylation can be increased by at least or at least about 1%, 2%, 3%, 4%, 5%, 6%, 7%, 8%, 9%, 10%, 20%, 30%, 40%, 50%, 60%, 70%, 80%, 90%, 100%, 200%, 300%, 400%, 500%, or more compared to the coagulation activity of unmodified or wild-type FIX polypeptide either in vivo or in vitro.

[0377] b. Increased Resistance to AT-III and Heparin

[0378] The activity of FIX can be inhibited by factors in the blood as part of the regulation of the coagulation process. Thus, provided herein are modified FIX polypeptides that exhibit increased resistance to the inhibitory effects of inhibitors, including AT-III and heparin. In some examples, the modified FIX polypeptides provided herein exhibit reduced binding affinity for heparin and/or a decreased second order rate constant for inhibition by AT-III alone and/or the AT-III/heparin complex. In further examples, the modified FIX polypeptides exhibit increased resistance to the AT-III alone, or heparin alone. Thus, provided herein are modified FIX polypeptides that exhibit increased resistance to AT-III, the AT-III/heparin complex and/or heparin.

[0379] i. AT-III

[0380] Antithrombin III (also known as antithrombin or AT-III) is an important anticoagulant serpin (serine protease inhibitor). AT-III is synthesized as a precursor protein containing 464 amino acid residues (SEQ ID NO:21). In the course of secretion a 32 residue signal peptide is cleaved to generate a 432 amino acid mature human antithrombin (SEQ ID NO:22). The 58 kDa AT-III glycoprotein circulates in the blood and functions as a serine protease inhibitor (serpin) to inhibit a large number of serine proteases of the coagulation system. The principal targets of AT-III are thrombin, factor Xa and factor IXa, although AT-III also has been shown to inhibit the activities of FXIa, FXIIa and, to a lesser extent, FVIIa.

[0381] The action of AT-III is greatly enhanced by glycosaminoglycans, such as the naturally occurring heparan sulfate or the various tissue-derived heparins that are widely used as anticoagulants in clinical practice. Unlike other serpins, which typically are effective without binding a secondary molecule, the reaction of AT-III in the absence of heparin with is target coagulations factors is unusually slow. In the absence of heparin, the reactive loop sequence of AT-III provides the determinants of the slow reactivity. Mutagenesis of the conserved P2-P1′ residues in the reactive loop center of AT-III, for example, affects the interaction of AT-III with proteases in the absence but not the presence of heparin.

[0382] AT-III binds in a highly specific manner to a unique pentasaccharide sequence in heparin that induces a conformational change in the reactive center loop. In such a conformation, the reactive center loop of AT-III can more efficiently interact with the reactive site of the serine protease, and effect inhibition. Evidence indicates that binding of heparin to AT-III generates new exosites that promote the interaction of FIXa, thrombin and FXa with AT-III. The tyrosine at position 253 and the glutamic acid at position 255, for example, have been shown to be key determinants of an exosite on AT-III that is generated by heparin binding, and that promotes the rapid, increased inhibition of FIXa by AT-III, compared to the inhibition observed with AT-III alone (Izaguirre et al., (2006) J. Biol. Chem. 281:13424-13432).

[0383] Mutational studies also have provided an indication of which residues in Factor IXa are involved in the interaction with AT-III/heparin. For example, modification of the arginine at position 318 of the mature FIX polypeptide (corresponding to position 150 by chymotrypsin numbering) reduces the reactivity of this mutant with AT-III/heparin by 33-fold to 70-fold (Yang, L. et al., (2003) J. Biol. Chem. 278(27):25032-8). The impairment of the reactivity between the FIXa mutant and AT-III is not as noticeable when AT-III is not bound to heparin, however, indicating that the interaction between the arginine at position 318 of the mature FIXa polypeptide and AT-III is effected when AT-III is in the heparin-activated conformation.

[0384] ii. Heparin

[0385] Heparin can inhibit the activity of FIXa in the intrinsic tenase complex in both an AT-III-dependent manner, as discussed above, and an AT-III-independent manner. Studies indicate that the AT-III-independent inhibition of FIXa activity by heparin is the result of oligosaccharide binding to an exosite on FIXa that disrupts the FVIIIa-FIXa interaction (Yuan et al., (2005) Biochem. 44:3615-3625; Misenheimer et al., (2007) Biochem. 46:7886-7895; Misenheimer et al. (2010) Biochem. 49:9977-10005). The heparin-binding exosite is in the Factor IXa protease domain, in an electropositive region extending from the arginine at position 338 (corresponding to position 170 by chymotrypsin numbering) to at least the arginine at position 403 (corresponding to position 233 by chymotrypsin numbering). This exosite overlaps with a region of FIXa that is critical to the interaction of FIXa with its cofactor, FVIIIa. Thus, binding of heparin to FIXa inhibits the interaction of FIXa with FVIIIa, thus reducing the intrinsic tenase activity.

[0386] iii. Exemplary FIX Polypeptides with Increased Resistance to AT-III and Heparin

[0387] Modifications can be made to a FIX polypeptide that increase its resistance to AT-III, heparin and/or the AT-III/heparin complex. Generally, such modified FIX polypeptides retain at least one activity of a FIX polypeptide. Typically, such modifications include one or more amino acid substitutions at any position of the FIX polypeptide that is involved in the interaction of FIXa with AT-III, heparin and/or the AT-III/heparin complex. Such modifications can, for example, result in a reduced rate of interaction of the modified FIXa polypeptide with AT-III alone, a reduced rate of interaction of the modified FIXa polypeptide to the AT-III/heparin complex, and/or a reduced binding affinity of the modified FIXa polypeptide for heparin alone. In some examples, the modification(s) introduces one or more non-native glycosylation sites. The carbohydrate moiety that is linked to the new glycosylation site can sterically hinder the interaction of the modified FIX with the AT-III/heparin complex, resulting in increased resistance of the modified FIX polypeptide to the inhibitory effects of AT-III/heparin. The modified FIXa polypeptides therefore exhibit increased resistance to the naturally inhibitory effects of AT-III, AT-III/heparin and/or heparin with respect to intrinsic tenase activity. When evaluated in an appropriate in vitro assay, or in vivo, such as following administration to a subject as a pro-coagulant therapeutic, the modified FIX polypeptides display increased coagulant activity as compared with unmodified FIX polypeptides.

[0388] As described herein below, one of skill in the art can empirically or rationally design modified FIXa polypeptides that display increased resistance to AT-III, AT-III/heparin and/or heparin. Such modified FIX polypeptides can be tested in assays known to one of skill in the art to determine if the modified FIX polypeptides display increased resistance to AT-III, AT-III/heparin and/or heparin. For example, the modified FIX polypeptides can be tested for binding to AT-III, AT-III/heparin and/or heparin. Generally, a modified FIX polypeptide that has increased resistance to AT-III, AT-III/heparin and/or heparin will exhibit decreased binding and/or decreased affinity for heparin and/or a decreased rate of interaction with AT-III and/or AT-III/heparin. Typically, such assays are performed with the activated form of FIX (FIXa), and in the presence or absence of the cofactor, FVIIIa, and phospholipids.

[0389] Provided herein are modified FIX polypeptides exhibiting increased resistance to AT-III, AT-III/heparin and/or heparin. FIX polypeptide variants provided herein have been modified at one or more of amino acid positions 202, 203, 204, 205, 228, 239, 257, 260, 293, 312, 316, 318, 319, 321, 333, 338, 342, 346, 400, 403, or 410 (corresponding to amino acid positions 38, 39, 40, 41, 63, 74, 92, 95, 126, 143, 145, 148, 150, 151, 153, 165, 170, 174, 178, 230, 233, and 240 respectively, by chymotrypsin numbering). These amino acid residues can be modified such as by amino acid replacement, deletion or substitution. The identified residues can be replaced or substituted with any another amino acid. Alternatively, amino acid insertions can be used to alter the conformation of a targeted amino acid residue or the protein structure in the vicinity of a targeted amino acid residue.

[0390] Any amino acid residue can be substituted for the endogenous amino acid residue at the identified positions. Typically, the replacement amino acid is chosen such that it interferes with the interaction between FIX and AT-III or heparin. For example, modifications can be made at amino acid positions 260, 293, 333, 338, 346, 400 and 410 (corresponding to amino acid positions 95, 126, 165, 170, 178, 230, 233 and 240, respectively, by chymotrypsin numbering) to interfere with the interaction of the FIX polypeptide with heparin. In other examples, modifications are made at amino acid positions 203, 204, 205, 228, 239, 312, 314, 316, 318, 319, 321, and 342 (corresponding to amino acid positions 39, 40, 41, 63, 74, 143, 145, 148, 150, 151, 153, and 174, respectively, by chymotrypsin numbering) to interfere with the interaction of the FIX polypeptide with AT-III.

[0391] In some examples, a new glycosylation site is introduced by amino acid replacement. The carbohydrate moiety that is linked to the new glycosylation site can sterically hinder the interaction of the modified FIX with the AT-III/heparin complex, resulting in increased resistance of the modified FIX polypeptide to the inhibitory effects of AT-III/heparin. For example, the glutamic acid (Glu, E) at position 410 (corresponding to position 240 by chymotrypsin numbering) can be replaced with an asparagine (Asn, N) to introduce a new glycosylation site at position 410. In other examples, the glutamic acid (Glu, E) at position 239 (corresponding to position 74 by chymotrypsin numbering) is replaced with an asparagine (Asn, N) to introduce a new glycosylation site at position 239. Other mutations that introduce a new glycosylation site to increase resistance to AT-III/heparin include, for example, D203N/F205T, R318N/A320S, N260S, and F314N/K316S (corresponding to D39N/F41T, R150N/A152S, N95S, and F145N/K148S, by chymotrypsin numbering).

[0392] In other examples in which modifications are made to increase resistance to AT-III, AT-III/heparin and/or heparin, the valine residue at position 202 (corresponding to position 38 by chymotrypsin numbering) is replaced with a methionine (Met, M) or tyrosine (Tyr, Y); the aspartic acid (Asp, D) at position 203 (corresponding to position 39 by chymotrypsin numbering) is replaced with a methionine (Met, M) or tyrosine (Tyr, Y); the alanine (Ala, A) at position 204 (corresponding to position 40 by chymotrypsin numbering) is replaced with a methionine (Met, M) or tyrosine (Tyr, Y); the glutamic acid at position 239 (corresponding to position 74 by chymotrypsin numbering) is replaced with serine (Ser, S), alanine (Ala, A), arginine (Arg, R), or lysine (Lys, K); the histidine at position 257 (corresponding to position 92 by chymotrypsin numbering) is replaced with phenylalanine (Phe, F), tyrosine (Tyr, Y), glutamic acid (Glu, E) or serine (Ser, S); the lysine (Lys, K) at position 293 (corresponding to position 143 by chymotrypsin numbering) is replaced with alanine (Ala, A) or glutamine (Gln, Q); the arginine (Arg, R) at position 312 (corresponding to position 143 by chymotrypsin numbering) is replaced with alanine (Ala, A) or glutamine (Gln, Q); the lysine at position 316 (corresponding to 148 by chymotrypsin numbering) is replaced with asparagine (Asn, N), alanine (Ala, A), glutamic acid (Glu, E), serine (Ser, S) or methionine (Met, M); the arginine (Arg, R) at position 318 (corresponding to position 150 by chymotrypsin numbering) is replaced with alanine (Ala, A), glutamic acid (Glu, E) tyrosine (Tyr, Y), phenylalanine (Phe, F) or tryptophan (Trp, W); the arginine (Arg, R) at position 333 (corresponding to position 165 by chymotrypsin numbering) is replaced with alanine (Ala, A) or glutamic acid (Glu, E); the arginine (Arg, R) at position 338 (corresponding to position 170 by chymotrypsin numbering) is replaced with alanine (Ala, A) or glutamic acid (Glu, E); the lysine (Lys, K) at position 400 (corresponding to position 230 by chymotrypsin numbering) is replaced with alanine (Ala, A) or glutamic acid (Glu, E); and/or the arginine (Arg, R) at position 403 (corresponding to position 233 by chymotrypsin numbering) is replaced with alanine (Ala, A), glutamic acid (Glu, E) or aspartic acid (Asp, D).

[0393] Provided herein are modified FIX polypeptides that contains an amino acid replacement at residue R318 or at a residue in a FIX polypeptide corresponding to 318 that is a tyrosine, e.g., R318Y, or is a conservative amino acid replacement thereof. For example, conservative amino acid residues for tyrosine include, but are not limited to, phenylalanine (F) or tryptophan (W). Also provided are modified FIX polypeptides that contains an amino acid replacement at residue R403 or at a residue in a FIX polypeptide corresponding to 403 that is a glutamic acid, e.g., R403E, or is a conservative amino acid replacement thereof. For example, conservative amino acid residues for glutamic acid include, but are not limited to, aspartic acid (D).

[0394] In a further embodiment, combination mutants can be generated. Included among such combination mutants are those having two or more mutations at amino acid positions 202, 203, 204, 257, 239, 293, 312, 316, 318, 333, 338, 400, 403, and 410 (corresponding to amino acid positions 38, 39, 40, 74, 92, 126, 143, 148, 150, 165, 170, 230, 233, and 240, respectively, by chymotrypsin numbering). For example, a modified FIX polypeptide can possess amino acid substitutions at 2, 3, 4, 5 or more of the identified positions. Hence, a modified polypeptide can display 1, 2, 3, 4, 5 or more mutations that can result in increased resistance of the modified FIX polypeptide to the inhibitory effects of AT-III, AT-III/heparin and/or heparin. Any one or more of the mutations described herein to increase resistance of the modified FIX polypeptide to the inhibitory effects of AT-III, AT-III/heparin and/or heparin can be combined. Table 8 provides non-limiting examples of exemplary amino acid replacements at the identified residues, corresponding to amino acid positions of a mature FIX polypeptide as set forth in SEQ ID NO:3. Included amongst these are exemplary combination mutations. As noted, such FIX polypeptides are designed to increase resistance to AT-III, AT-III/heparin and/or heparin, and therefore have increased coagulant activity in vivo, ex vivo, or in in vitro assays that include ATIII, heparin/ATIII, heparin, plasma, serum, or blood. In reference to such mutations, the first amino acid (one-letter abbreviation) corresponds to the amino acid that is replaced, the number corresponds to the position in the mature FIX polypeptide sequence with reference to SEQ ID NO:3, and the second amino acid (one-letter abbreviation) corresponds to the amino acid selected that replaces the first amino acid at that position. The amino acid positions for mutation also are referred to by the chymotrypsin numbering scheme. In Table 8 below, the sequence identifier (SEQ ID NO.) is identified in which exemplary amino acid sequences of the modified FIX polypeptide are set forth.

TABLE 8

| Mutation | Mutation | SEQ |
|---|---|---|
| (Mature FIX | (Chymotrypsin | ID |
| Numbering) | Numbering) | NO. |
| R318A | R150A | 120 |
| R318E | R150E | 121 |
| R318Y | R150Y | 122 |
| R318F | R150F | 413 |
| R318W | R150W | 414 |
| R312Q | R143Q | 123 |
| R312A | R143A | 124 |
| R312Y | R143Y | 125 |
| R312L | R143L | 126 |
| V202M | V38M | 127 |
| V202Y | V38Y | 128 |
| D203M | D39M | 129 |
| D203Y | D39Y | 130 |
| A204M | A40M | 131 |
| A204Y | A40Y | 132 |
| K400A/R403A | K230A/R233A | 133 |
| K400E/R403E | K230E/R233E | 134 |
| R403A | R233A | 135 |
| R403E | R233E | 136 |
| R403D | R233D | 417 |
| K400A | K230A | 137 |
| K400E | K230E | 138 |
| K293E | K126E | 139 |
| K293A | K126A | 140 |
| R333A | R165A | 141 |
| R333E | R165E | 142 |
| R333S | R165S | 186 |
| R338A | R170A | 143 |
| R338E | R170E | 144 |
| R338L | R170L | 187 |
| R338A/R403A | R170A/R233A | 145 |
| R338E/R403E | R170E/R233E | 146 |
| K293A/R403A | K126A/R233A | 147 |
| K293E/R403E | K126E/R233E | 148 |
| K293A/R338A/R403A | K126A/R170A/R233A | 149 |
| K293E/R338E/R403E | K126E/R170E/R233E | 150 |
| R318A/R403A | R150A/R233A | 151 |
| R318E/R403E | R150E/R233E | 152 |
| R318Y/R338E/R403E | R150Y/R170E/R233E | 156 |
| R318Y/R338E | R150Y/R170E | 188 |
| R318N/A320S | R150N/A152S | 119 |
| K316N | K148N | 189 |
| K316A | K148A | 190 |
| K316E | K148E | 191 |
| K316S | K148S | 192 |
| K316M | K148M | 193 |
| E239N | E74N | 109 |
| E239S | E74S | 194 |
| E239A | E74A | 195 |
| E239R | E74R | 196 |
| E239K | E74K | 197 |
| H257F | H92F | 198 |
| H257Y | H92Y | 199 |
| H257E | H92E | 200 |
| H257S | H92S | 201 |
| E410N | E240N | 108 |
| N260S | N95S | 116 |
| F314N/K316S | F145N/K148S | 113 |

[0395] The modifications described herein to increase resistance to an inhibitor, such as AT-III and/or heparin, can be combined with any other mutation described herein or known in the art. Typically, the resulting modified FIX polypeptide exhibits increased coagulant activity compared to an unmodified FIX polypeptide. For example, one or more modifications that increase resistance to an inhibitor, such as AT-III and/or heparin, can be combined with modification(s) that introduce a non-native glycosylation site, eliminate one or more native glycosylation sites, eliminate one or more of the native sulfation, phosphorylation or hydroxylation sites, increase catalytic activity, increase intrinsic activity, increase binding to phospholipids, or improve pharmacokinetic and/or pharmacodynamic properties. The resulting modified FIX polypeptide typically exhibits increased coagulant activity compared to an unmodified FIX polypeptide.

[0396] Modified FIX polypeptides that have increased resistance for AT-III alone, the AT-III/heparin complex and/or heparin alone, can exhibit a reduction in the affinity for heparin, the extent of inhibition under specified conditions, or in the second order rate constant for inhibition by ATIII or heparin/ATIII at least or at least about 1%, 2%, 3%, 4%, 5%, 6%, 7%, 8%, 9%, 10%, 20%, 30%, 40%, 50%, 60%, 70%, 80%, 90%, 95%, 99% or more compared to the affinity, extent of inhibition, or the second order rate constant for inhibition of unmodified or wild-type FIX polypeptide either in vivo or in vitro. Thus, the modified FIX polypeptides can exhibit increased resistance to AT-III alone, the AT-III/heparin complex and/or heparin alone that is at least or at least about 1%, 2%, 3%, 4%, 5%, 6%, 7%, 8%, 9%, 10%, 20%, 30%, 40%, 50%, 60%, 70%, 80%, 90%, 100%, 200%, 300%, 400%, 500%, or more of the resistance exhibited by an unmodified FIX polypeptide. Increased resistance to AT-III, the AT-III/heparin complex and/or heparin by such modified FIX polypeptides also can be manifested as increased coagulation activity or improved duration of coagulation activity in vivo or in vitro in the presence of AT-III, the AT-III/heparin complex, heparin, blood, plasma, or serum. The coagulation activity of the modified FIX polypeptides can be increased by at least about 1%, 2%, 3%, 4%, 5%, 6%, 7%, 8%, 9%, 10%, 20%, 30%, 40%, 50%, 60%, 70%, 80%, 90%, 100%, 200%, 300%, 400%, 500%, or more compared to the coagulation activity of unmodified or wild-type FIX polypeptide either in vivo or in vitro. Modified FIX polypeptides containing modifications that increase resistance to AT-III, the heparin/AT-III complex, and/or heparin also can exhibit an enhanced therapeutic index compared with unmodified FIXa.

[0397] c. Mutations to Increase Catalytic Activity

[0398] The modified FIX polypeptides provided herein can contain one or more modifications to increase the catalytic activity of the polypeptide compared to an unmodified FIX. For example, modifications can be made to the amino acids that are involved in the interaction of FIX with its cofactor, FVIIIa, such that the resulting modified FIX polypeptide has increased affinity for FVIIIa, and thereby displays increased activity toward FX under conditions in which FVIIIa is not present at saturating concentrations. Modifications also can be made to the protease domain of the FIX polypeptide, such that the activity or catalytic efficiency of the modified FIX polypeptide for activation of FX, in the presence and/or absence of the co-factor FVIIIa, is increased compared to the activity or catalytic efficiency of the unmodified polypeptide.

[0399] Exemplary modifications that can be included in the modified FIX polypeptides provided herein include amino acid replacements at positions 259, 265, 345, 410, and 412 (corresponding to 94, 98, 177, 240, and 242, by chymotrypsin numbering). The amino acids at these positions can be replaced by any other amino acid residue. In some examples, the tyrosine at position 259 is replaced with a phenylalanine; the lysine at position 265 is replaced with a threonine; and/or the tyrosine at position 345 is replaced with a threonine. In further example, the glutamic acid at position 410 is replaced with a glutamine, serine, alanine or aspartic acid. In one example, the threonine at position 412 is replaced with a valine or an alanine.

[0400] The above mentioned modifications are exemplary only. Many other modifications described herein also result in increased catalytic activity. For example, modifications that are introduced into the FIX polypeptide to increase resistance to an inhibitor, such as AT-III and/or heparin, introduce a non-native glycosylation site, eliminate one or more native glycosylation sites, eliminate one or more of the native sulfation, phosphorylation or hydroxylation sites, increase intrinsic activity, increase binding to phospholipids, decrease binding to LRP, and/or improve pharmacokinetic and/or pharmacodynamic properties, can also result in a modified FIX polypeptide that exhibits increased activity.

[0401] Table 9 provides non-limiting examples of exemplary amino acid replacements at the identified residues, corresponding to amino acid positions of a mature FIX polypeptide as set forth in SEQ ID NO:3. In reference to such mutations, the first amino acid (one-letter abbreviation) corresponds to the amino acid that is replaced, the number corresponds to the position in the mature FIX polypeptide sequence with reference to SEQ ID NO:3, and the second amino acid (one-letter abbreviation) corresponds to the amino acid selected that replaces the first amino acid at that position. The amino acid positions for mutation also are referred to by the chymotrypsin numbering scheme. In Table 9 below, the sequence identifier (SEQ ID NO) is identified in which exemplary amino acid sequences of the modified FIX polypeptide are set forth.

TABLE 9

| Mutation | Mutation | SEQ |
|---|---|---|
| (Mature FIX | (Chymotrypsin | ID |
| Numbering) | Numbering) | NO |
| T412A | T242A | 202 |
| T412V | T242V | 203 |
| E410Q | E240Q | 174 |
| E410S | E240S | 175 |
| E410A | E240A | 176 |
| E410D | E240D | 206 |
| Y259F/K265T/Y345T | Y94F/K98T/Y177T | 216 |

[0402] The modifications described herein to increase catalytic activity can be combined with any other mutation described herein or known in the art. Typically, the resulting modified FIX polypeptide exhibits increased coagulant activity compared to an unmodified FIX polypeptide. For example, one or more modifications that increase catalytic activity can be combined with modification(s) that increase resistance to an inhibitor, such as AT-III and/or heparin, introduce a non-native glycosylation site, eliminate one or more native glycosylation sites, eliminate one or more of the native sulfation, phosphorylation or hydroxylation sites, increase intrinsic activity, increase binding to phospholipids, or improve pharmacokinetic and/or pharmacodynamic properties. The resulting modified FIX polypeptide typically exhibits increased coagulant activity compared to an unmodified FIX polypeptide.

[0403] Modified FIX polypeptides that have increased catalytic activity can exhibit at least or about 1%, 2%, 3%, 4%, 5%, 6%, 7%, 8%, 9%, 10%, 20%, 30%, 40%, 50%, 60%, 70%, 80%, 90%, 95%, 99% or more activity compared to the catalytic activity of unmodified or wild-type FIX polypeptide either in vivo or in vitro. Increased catalytic activity of such modified FIX polypeptides also can be manifested as increased coagulation activity, duration of coagulation activity and/or enhanced therapeutic index. The coagulation activity of the modified FIX polypeptides can be increased by at least or at least about 1%, 2%, 3%, 4%, 5%, 6%, 7%, 8%, 9%, 10%, 20%, 30%, 40%, 50%, 60%, 70%, 80%, 90%, 100%, 200%, 300%, 400%, 500%, or more compared to the coagulation activity of unmodified or wild-type FIX polypeptide either in vivo or in vitro.

[0404] d. Mutations to Decrease LRP Binding

[0405] FIXa can be cleared from systemic circulation by binding the low-density lipoprotein receptor-related protein (LRP), which is a membrane glycoprotein that is expressed on a variety of tissues, including liver, brain, placenta and lung. Thus, provided herein are modified FIX polypeptides that exhibit decreased binding to the LRP. This can result in improved pharmacokinetic properties of the modified FIX polypeptide, including, for example, i) decreased clearance, ii) altered volume of distribution, iii) enhanced in vivo recovery, iv) enhanced total protein exposure in vivo (i.e., AUC), v) increased serum half-life (α, β, and/or γ phase), and/or vi) increased mean resonance time (MRT). Such modified FIX polypeptides can exhibit increased coagulant activity.

[0406] The modified FIX polypeptide provided herein can contain one or more modifications in the LRP-binding site. This binding site is postulated to be located in a loop in the protease domain spanning residues 342 to 346 of the mature FIX polypeptide set forth in SEQ ID NO:3. Modification of one or more of the residues at positions 342-346 (corresponding to positions 174-178 by chymotrypsin numbering), such as by amino acid replacement, insertion or deletion, can interfere with the interaction between the modified FIX polypeptide and LRP, resulting in decreased binding affinity. The binding of the modified FIX polypeptides to LRP can be tested using assays known to one of skill in the art (see, e.g., Rohlena et al., (2003) J. Biol. Chem. 278:9394-9401). The resulting improved pharmacokinetic properties also can be tested using well known in vivo assays, including those described below.

[0407] Exemplary modifications that can be included in the modified FIX polypeptides provided herein include amino acid replacements at positions 343, 344, 345, and 346 (corresponding to 175, 176, 177, and 178, by chymotrypsin numbering). The amino acids at these positions can be replaced by any other amino acid residue. In some examples, the threonine at position 343 is replaced with a glutamine, glutamic acid, aspartic acid or arginine; the phenylalanine at position 344 is replaced with an isoleucine; the tyrosine at position 345 is replaced with a threonine, alanine or an alanine; and/or the asparagine at position 346 is replaced with an aspartic acid or a tyrosine. Any one or more of these exemplary amino acid replacements can be combined with each other or with other modifications described herein.

[0408] Provided herein are modified FIX polypeptides that contains an amino acid replacement at residue T343 or at a residue in a FIX polypeptide corresponding to 343 that is an arginine, e.g., T343R, or is a conservative amino acid replacement thereof. For example, conservative amino acid residues for arginine include, but are not limited to, lysine (K).

[0409] Table 10 provides non-limiting examples of exemplary amino acid replacements at the identified residues, corresponding to amino acid positions of a mature FIX polypeptide as set forth in SEQ ID NO:3. In reference to such mutations, the first amino acid (one-letter abbreviation) corresponds to the amino acid that is replaced, the number corresponds to the position in the mature FIX polypeptide sequence with reference to SEQ ID NO:3, and the second amino acid (one-letter abbreviation) corresponds to the amino acid selected that replaces the first amino acid at that position. The amino acid positions for mutation also are referred to by the chymotrypsin numbering scheme. In Table 10 below, the sequence identifier (SEQ ID NO) is identified in which exemplary amino acid sequences of the modified FIX polypeptide are set forth.

TABLE 10

| Mutation | Mutation | SEQ |
|---|---|---|
| (Mature FIX | (Chymotrypsin | ID |
| Numbering) | Numbering) | NO. |
| N346D | N178D | 207 |
| N346Y | N178Y | 208 |
| T343R | T175R | 209 |
| T343E | T175E | 210 |
| T343D | T175D | 416 |
| T343Q | T175Q | 211 |
| F342I | F1741 | 212 |
| Y345A | Y177A | 213 |
| Y345T | Y177T | 214 |
| T343R/Y345T | T175R/Y177T | 215 |
| T343R/N346D | T175R/N178D | 409 |
| T343R/N346Y | T175R/N178Y | 410 |

[0410] The modifications described herein to decrease binding to LRP can be combined with any other mutation described herein or known in the art. Typically, the resulting modified FIX polypeptide exhibits increased coagulant activity compared to an unmodified FIX polypeptide. For example, one or more modifications that decrease binding to LRP can be combined with modification(s) that increase resistance to an inhibitor, such as AT-III and/or heparin, increase catalytic activity, introduce a non-native glycosylation site, eliminate one or more native glycosylation sites, eliminate one or more of the native sulfation, phosphorylation or hydroxylation sites, increase activity in the presence and/or absence of FVIIIa, increase binding to phospholipids, or improve pharmacokinetic and/or pharmacodynamic properties. The resulting modified FIX polypeptide typically exhibits increased coagulant activity compared to an unmodified FIX polypeptide.

[0411] Modified FIX polypeptides that have decreased binding to LRP can exhibit at a decrease of at least or about 1%, 2%, 3%, 4%, 5%, 6%, 7%, 8%, 9%, 10%, 20%, 30%, 40%, 50%, 60%, 70%, 80%, 90%, 95%, 99% or more compared to the binding of unmodified or wild-type FIX polypeptide to LRP in vitro. Decreased binding to LRP by such modified FIX polypeptides can result in improved pharmacokinetic properties, such as i) decreased clearance, ii) altered volume of distribution, iii) enhanced in vivo recovery, iv) enhanced total protein exposure in vivo (i.e., AUC), v) increased serum half-life (αγ, β, and/or γ phase), and/or vi) increased mean resonance time (MRT). Further, such alterations can result in increased coagulant activity, duration of coagulation activity and/or enhanced therapeutic index. The coagulation activity of the modified FIX polypeptides can be increased by at least or at least about 1%, 2%, 3%, 4%, 5%, 6%, 7%, 8%, 9%, 10%, 20%, 30%, 40%, 50%, 60%, 70%, 80%, 90%, 100%, 200%, 300%, 400%, 500%, or more compared to the coagulation activity of unmodified or wild-type FIX polypeptide either in vivo or in vitro.

[0412] e. Other Mutations to Alter Post-Translational Modifications

[0413] Wild-type FIX is post-translationally modified upon expression in mammalian cells. The Factor IX precursor polypeptide undergoes extensive posttranslational modification to become the mature zymogen that is secreted into the blood. Such posttranslational modifications include γ-carboxylation, β-hydroxylation, O- and N-linked glycosylation, sulfation and phosphorylation. As discussed above, the levels of glycosylation can be altered by, for example, introducing new non-native glycosylation sites and/or eliminating native glycosylation sites. Similarly, other posttranslational modifications can be altered, such as by introducing and/or eliminating γ-carboxylation, β-hydroxylation, sulfation and/or phosphorylation sites.

[0414] Any one or more of the native γ-carboxylation, β-hydroxylation, sulfation or phosphorylation sites can be eliminated, such as by amino acid replacement or deletion. For example, unmodified FIX polypeptides can be modified by amino acid replacement of any one or more of the twelve glutamic acid residues (corresponding to positions 7, 8, 15, 17, 20, 21, 26, 27, 30, 33, 36, and 40 of the mature FIX polypeptide set forth in SEQ ID NO:3) in the Gla domain. These residues typically are γ-carboxylated to γ-carboxyglutamyl (or Gla) in wild-type FIX. Thus, removal of the glutamic acid residues, such as by amino acid substitution or deletion, can reduce the level of γ-carboxylation in a modified FIX polypeptide compared to the unmodified FIX polypeptide. Similarly, the aspartic acid residue at position 64, which normally is β-hydroxylated in wild-type FIX, can be removed, such as by amino acid substitution or deletion. Additional post-translational modification sites that can be eliminated include, for example, the tyrosine at position 155, which typically is sulfated in wild-type FIX, and the serine residue at position 158, which typically is phosphorylated in wild-type FIX.

[0415] In other examples, non-native post-translational modification sites can be introduced, such as by amino acid replacement or insertion. For example, additional glutamic acid residues can be introduced into the Gla domain. Such glutamic acid residues could be γ-carboxylated to γ-carboxyglutamyl (or Gla) in the modified FIX polypeptide upon expression in, for example, a mammalian cell. Similarly, one or more non-native β-hydroxylation, sulfation or phosphorylation sites can be introduced.

[0416] Provided herein are modified FIX polypeptides that have one or more of the native posttranslational modification sites eliminated. The modified FIX polypeptides that have been modified to eliminate one or more post-translational modification sites, including γ-carboxylation, β-hydroxylation, sulfation and/or phosphorylation sites, retain at least one activity of the unmodified FIX polypeptide. In some examples, the modified FIX polypeptide retains at least or at least about 5%, 10%, 20%, 30%, 40%, 50%, 60%, 70%, 80%, 90%, 95% or more of the catalytic activity of the unmodified FIX polypeptide. In other examples, the modified FIX polypeptide retains at least or at least about 5%, 10%, 20%, 30%, 40%, 50%, 60%, 70%, 80%, 90%, 95% or more of the binding activity for FVIIIa of the unmodified FIX polypeptide. In some assays and/or under some conditions, the modified FIX polypeptides can exhibit increased activity compared with the unmodified FIX protein (e.g., increased pharmacodynamic activity in vivo, and/or activity in the presence of AT-III/heparin or plasma).

[0417] Provided herein are modified FIX polypeptides that contains an amino acid replacement at residue Y155 or at a residue in a FIX polypeptide corresponding to 155 that is a phenylalanine, e.g., Y155F, or is a conservative amino acid replacement thereof. For example, conservative amino acid residues for phenylalanine include, but are not limited to, methionine (M), leucine (L) or tyrosine (Y).

[0418] Table 11 provides non-limiting examples of exemplary amino acid replacements, corresponding to amino acid positions of a mature FIX polypeptide as set forth in SEQ ID NO:3, that are included in a modified FIX polypeptide to eliminate a native β-hydroxylation, sulfation and/or phosphorylation sites at positions 64, 155 and 158, respectively. In Table 11 below, the sequence identifier (SEQ ID NO) is identified in which exemplary amino acid sequences of the modified FIX polypeptide are set forth.

TABLE 11

| Mutation | Mutation | SEQ |
|---|---|---|
| (Mature FIX | (Chymotrypsin | ID |
| Numbering) | Numbering) | NO. |
| D64N | D[64]N | 83 |
| D64A | D[64]A | 84 |
| Y155F | Y[155]F | 76 |
| Y155H | Y[155]H | 93 |
| Y155Q | Y[155]Q | 94 |
| T155L | Y[155]L | 415 |
| S158A | S[158]A | 95 |
| S158D | S[158]D | 96 |
| S158E | S[158]E | 97 |

[0419] The modifications described herein to eliminate β-hydroxylation, sulfation and/or phosphorylation sites can be combined with any other mutation described herein or known in the art. Typically, the resulting modified FIX polypeptide exhibits increased coagulant activity compared to an unmodified FIX polypeptide. For example, one or more modifications that eliminate one or more native β-hydroxylation, sulfation and/or phosphorylation sites can be combined with modification(s) that increase resistance to an inhibitor, such as AT-III and/or heparin, alter glycosylation, such as increase glycosylation, increase catalytic activity, increase intrinsic activity, increase binding to phospholipids, or improve pharmacokinetic and/or pharmacodynamic properties.

[0420] The modified FIX polypeptides provided herein that eliminate one or more native β-hydroxylation, sulfation and/or phosphorylation sites retain at least one activity of FIX, such as, for example, catalytic activity for its substrate, FX, or binding to the co-factor, FVIIIa. Typically, the modified FIX polypeptides provided herein retain at least or at least about 5%, 10%, 20%, 30%, 40%, 50%, 60%, 70%, 80%, 90%, 95% or more of the catalytic activity exhibited by an unmodified FIX polypeptide. In some instances, the coagulant activity of the modified FIX polypeptides is increased by at least or at least about 1%, 2%, 3%, 4%, 5%, 6%, 7%, 8%, 9%, 10%, 20%, 30%, 40%, 50%, 60%, 70%, 80%, 90%, 100%, 200%, 300%, 400%, 500%, or more compared to the coagulation activity of unmodified or wild-type FIX polypeptide either in vivo or in vitro.

[0421] 2. Combination Modifications

[0422] The modified FIX polypeptides provided herein that contain one or more non-native glycosylation sites, have one or more native glycosylation sites eliminated, have one or more native β-hydroxylation, sulfation and/or phosphorylation sites eliminated, or that have modifications that can result in increased resistance to inhibitors, such as AT-III, AT-III/heparin and/or heparin, compared to a wild-type FIX polypeptide, also can contain other modifications. In some examples, the modified FIX polypeptides contain modifications that introduce one or more non-native glycosylation sites and also contain modifications that interfere with the interaction between FIX and inhibitors, such as AT-III, the AT-III/heparin complex and/or and heparin. In other examples, modifications that eliminate one or more native β-hydroxylation, sulfation and/or phosphorylation sites can be combined with modifications that increase resistance to inhibitors, and/or modifications that introduce one or more glycosylation sites. Thus, one or more of the mutations set forth in Tables 3-9 above, can be combined with any of the other mutations set forth in Tables 3-9 above. Thus, included among the modified FIX polypeptides provided herein are those that exhibit increased glycosylation, such as N-glycosylation; increased resistance to AT-III, AT-III/heparin, and/or heparin; decreased β-hydroxylation, sulfation and/or phosphorylation; and/or increased catalytic activity compared with an unmodified FIX polypeptide.

[0423] Further, any of the modified FIX polypeptides provided herein can contain any one or more additional modifications. In some examples, the additional modifications result in altered properties and/or activities compared to an unmodified FIX polypeptide. Typically, such additional modifications are those that themselves result in an increased coagulant activity of the modified polypeptide and/or increased stability of the polypeptide. Accordingly, the resulting modified FIX polypeptides typically exhibit increased coagulant activity.

[0424] The additional modifications can include, for example, any amino acid substitution, deletion or insertion known in the art, typically any that increases the coagulant activity and/or stability of the FIX polypeptide. Any modified FIX polypeptide provided herein can contain 1, 2, 3, 4, 5, 6, 7, 8, 9, 10, 11, 12, 13, 14, 15, 16, 17, 18, 19, 20, or more, additional amino acid modifications. Typically, the resulting modified FIX polypeptide retains at least one activity of the wild-type or unmodified polypeptide, such as, for example, catalytic activity, or binding to the co-factor, FVIIIa.

[0425] Additional modifications in the primary sequence can be made to the FIX polypeptide to effect post-translational modifications. For example, the modified FIX polypeptides provided herein can contain non-native glycosylation sites including and other than those described above, such as any of those described in the art, including non-native O-linked or S-linked glycosylation sites described in U.S. Patent Publication No. 2008/0280818, or the non-native glycosylation sites described in International Application Publication Nos. WO 2009/1300198 and WO 2009/137254.

[0426] In other examples, the additional modification can be made to the FIX polypeptide sequence such that its interaction with other factors, molecules and proteins is altered. For example, the amino acid residues that are involved in the interaction with Factor X can be modified such that the affinity and/or binding of the modified FIX polypeptide to FX is increased. Other modifications include, but are not limited to, modification of amino acids that are involved in interactions with FVIIIa, heparin, antithrombin III and phospholipids.

[0427] Additional modifications also can be made to a modified FIX polypeptide provided herein that alter the conformation or folding of the polypeptide. These include, for example, the replacement of one or more amino acids with a cysteine such that a new disulfide bond is formed, or modifications that stabilize an α-helix conformation, thereby imparting increased activity to the modified FIX polypeptide.

[0428] Modifications also can be made to introduce amino acid residues that can be subsequently linked to a moiety, such as one that acts to increase stability of the modified FIX polypeptide. For example, cysteine residues can be introduced to facilitate conjugation to a polymer, such polyethylene glycol (PEG) (International App. Pub. No. WO 2009/140015). The stability of a FIX polypeptide also can be altered by modifying potential proteolytic sites, such as removing potential proteolytic sites, thereby increasing the resistance of the modified FIX polypeptide to proteases (see, e.g., U.S. Pat. Pub. No. 2008/0102115).

[0429] Additionally, amino acids substitutions, deletions or insertions can be made in the endogenous Gla domain such that the modified FIX polypeptide displays increased binding and/or affinity for phospholipid membranes. Such modifications can include single amino acid substitution, deletions and/or insertions, or can include amino acid substitution, deletion or insertion of multiple amino acids. For example, all or part of the endogenous Gla domain can be replaced with all or part of a heterologous Gla domain. In other examples, the modified FIX polypeptides provided herein can display deletions in the endogenous Gla domain, or substitutions in the positions that are normally gamma-carboxylated. Alternatively, amino acid substitutions can be made to introduce additional, potential gamma-carboxylation sites.

[0430] The following sections describe non-limiting examples of exemplary modifications described in the art to effect increased stability and/or coagulant activity of a FIX polypeptide. As discussed above, such modifications also can be additionally included in any modified FIX polypeptide provided herein. The amino acid positions referenced below correspond to the mature FIX polypeptide as set forth in SEQ ID NO:3. Corresponding mutations can be made in other FIX polypeptides, such as allelic, species or splice variants of the mature FIX polypeptide set forth in SEQ ID NO:3.

[0431] a. Modifications to Increase Activity

[0432] In one example, additional modifications can be made to a modified factor IX polypeptide provided herein that result in increased catalytic activity toward factor X. For example, modifications can be made to the amino acids that are involved in the interaction with its cofactor, FVIIIa, such that the resulting modified FIX polypeptide has increased affinity for FVIIIa, and thereby displays increased activity toward FX under conditions in which FVIIIa is not saturating. Modifications can also be made in FIX that increase the catalytic efficiency of FIXa polypeptides and/or the FIXa/FVIIIa complex, compared to the activity of the unmodified FIXa polypeptide or FIXa/FVIIIa complex, for activation of the substrate FX.

[0433] Examples of additional modifications that can be included in the modified FIX polypeptides described herein to increase the intrinsic activity of the modified FIX polypeptide include, but are not limited to, those described in Hopfner et al., (1997) EMBO J. 16:6626-6635; Kolkman et al., (2000) Biochem. 39:7398-7405; Sichler et al., (2003) J. Biol. Chem. 278:4121-4126; Begbie et al., (2005) J. Thromb. Haemost. 94(6):1138-47; U.S. Pat. No. 6,531,298; and U.S. Patent Publication Nos. 2008/0167219 and 2008/0214461. Non-limiting examples of exemplary amino acid modifications described in the art that can result in increased intrinsic activity of the modified FIX polypeptide include any one or more of V86A, V86N, V86D, V86E, V86Q, V86G, V86H, V86I, V86L, V86M, V86F, V86S, V86T, V86W, V86Y, Y259F, A261K, K265T, E277V, E277A, E277N, E277D, E277Q, E277G, E277H, E277I, E277L, E277M, E277F, E277S, E277T, E277W, E277Y, R338A, R338V, R338I, R338F, R338W, R338S, R338T, Y345F, I383V, and E388G. For example, a modified FIX polypeptide provided herein can contain the amino acid substitutions Y259F/K265T, Y259F/K265T/Y345F, Y259F/A261K/K265T/Y345F, Y259F/K265T/Y345F/I383V/E388G, or Y259F/A261K/K265T/Y345F/I383V/E388G. In another example, the modified FIX polypeptides provided herein can contain modifications that remove the activation peptide (Δ155-177) (see, e.g., Begbie et al., (2005) J. Thromb. Haemost. 94(6):1138-1147), which can both increase activity and decrease clearance in vivo.

[0434] b. Modifications that Increase Affinity for Phospholipids or Reduce Binding to Collagen

[0435] The modified FIX polypeptides provided herein also can contain one or more additional modifications to increase affinity for phospholipids. The coagulant activity of FIX can be enhanced by increasing the binding and/or affinity of the polypeptide for phospholipids, such as those expressed on the surface of activated platelets. This can be achieved, for example, by modifying the endogenous FIX Gla domain. Modification can be effected by amino acid substitution at one or more positions in the Gla domain of a FIX polypeptide that result in a modified FIX polypeptide with increased ability to bind phosphatidylserine and other negatively charged phospholipids. Examples of additional modifications to increase phospholipid binding and/or affinity and that can be made to a modified FIX polypeptide provided herein, include, but are not limited to, those described in U.S. Pat. No. 6,017,882. For example, a modified FIX polypeptide provided herein can contain one or more modifications at amino acid positions 11, 12, 29, 33 and/or 34 (corresponding to a mature FIX polypeptide set forth in SEQ ID NO:3). Exemplary of such modifications are amino acid substitutions K5I, K5L, K5F, K5E, Q11E, Q11D, R16E, R29F and/or N34E, N34D, N34F, N34I, N34L, T35D, and T35E.

[0436] In another aspect, the modified FIX polypeptides provided herein also can contain one or more additional modifications to reduce affinity for collagen. The coagulant activity of FIX can be enhanced by reducing the binding and/or affinity of the polypeptide for collagen IV, which is present on the surface of the extracellular matrix on endothelial cells. A reduced binding to collagen IV can result in increased circulation of the modified FIX polypeptides and, thus, increased coagulant activity in vivo. This can be achieved, for example, by modifying the FIX Gla domain at amino acid residues 3 to 11 of a mature FIX polypeptide set forth in SEQ ID NO:3, which are responsible for the interaction with collagen IV (see, e.g., Cheung et al., (1992) J. Biol. Chem. 267:20529-20531; Cheung et al., (1996) Proc. Natl. Acad. Sci. U.S.A. 93:11068-11073). Modification can be effected by amino acid substitution at one or more positions in the Gla domain of a FIX polypeptide that result in a modified FIX polypeptide with decreased ability to bind collagen IV. Examples of additional modifications to increase phospholipid binding and/or affinity and that can be made to a modified FIX polypeptide provided herein, include, but are not limited to, those described in Schuettrumpf et al., (2005) Blood 105(6):2316-23; Melton et al., (2001) Blood Coagul. Fibrinolysis 12(4):237-43; and Cheung et al., (1996) Proc. Natl. Acad. Sci. U.S.A. 93:11068-11073. For example, a modified FIX polypeptide provided herein can contain are amino acid substitutions K5A and/or V10K.

[0437] c. Additional Modifications to Increase Resistance to Inhibitors

[0438] Additional modifications can be included that increase the activity of the FIX polypeptide by increasing the resistance of the modified FIX polypeptide to inhibitors, such as, for example, inhibition by antithrombin III (AT-III)/heparin. Typically, this can be achieved by modifying one or more residues that are involved in the interaction with AT-III, heparin or the AT-III/heparin complex. Exemplary of such modifications include those described, for example, in U.S. Pat. No. 7,125,841; U.S. Pat. Pub. No. 2004/0110675; Int. App. Pub. No. WO 2002/040544; Chang, J. et al., (1998) J. Biol. Chem. 273(20):12089-94; Yang, L. et al., (2002) J. Biol. Chem. 277(52):50756-60; Yang, L. et al., (2003) J. Biol. Chem. 278(27):25032-8; Rohlena et al., (2003) J. Biol. Chem. 278(11):9394-401; Sheehan et al., (2006) Blood 107(10):3876-82; and Buyue et al. (2008) Blood 112:3234-3241. Non-limiting examples of modifications that can be included to decrease inhibition by AT-III and/or heparin, include, but are not limited to, modifications at amino acid positions corresponding to amino acid positions R252, H256, H257, K265, H268, K293, R318, R333, R338, K400, R403, K409, or K411, of a mature FIX polypeptide set forth in SEQ ID NO:3. For example, the FIX polypeptides provided herein can contain the amino acid substitutions R252A, H257A, H268A, K293A, R318A, R333A, R338A, K400A, R403A, R403E, and/or K411A.

[0439] d. Additional Modifications to Alter Glycosylation

[0440] Modifications, in addition to those described above can be incorporated into the modified FIX polypeptides provided herein to alter the glycosylation of the modified FIX polypeptides compared to an unmodified FIX polypeptide. For example, the modified FIX polypeptides can contain one or more modifications that introduce one or more non-native glycosylation sites into the modified FIX polypeptide. Thus, when expressed in an appropriate system, the modified FIX polypeptides can exhibit altered glycosylation patterns compared to an unmodified FIX polypeptide. In some examples, the modified FIX polypeptides exhibit increased glycosylation compared to an unmodified FIX polypeptide, such as increased N-glycosylation or increased O-glycosylation.

[0441] Examples of additional modifications that can be included in the modified FIX polypeptides provided herein to alter the glycosylation profile of a FIX polypeptide include, but are not limited to, those described in International Application Publication Nos. WO 2009/130198, WO 2009/051717 and WO 2009/137254. Exemplary modifications that can be included in a modified FIX polypeptide provided herein to increase glycosylation include, but are not limited to, Y1N, Y1N+S3T, S3N+K5S/T, G4T, G4N+L6S/T, K5N+E7T, L6N+EBT, E7N+F9T, F9N+Q11S/T, V10N+G12S/T, Q11N+N13T, G12N+L14S/T, L14N+R16T, E15T, E15N+E17T; R16N+C18S/T, M19N+E21T; E20N+K22T, K22N, S24N+E26T; F25N+E27T; E26N+A28T; E27N+R29T; A28N+E30T; R29N+V31S/T, E30N+F32T; V31N+E33T; F32N+N34T, E33N, T35N+R37S/T, E36T; E36N; R37N, T39N+F41S/T, E40N+W42T, F41N+K43S/T, W42N+Q44S/T, K43N+Y45T; Q44N+V46S/T, Y45N+D47T, V46N+G48S/T, D47N+D49S/T, G48N+Q50S/T, D49N+C51S/T, Q50N+E52S/T, E52N+N54T, S53N+P55S/T, C56S/T, L57N+G59S/T, G59N+S61T; G60S/T, S61N+K63S/T, K63N+D65S/T, D65N+N67S/T, I66N+S68S/T, Y69S/T, Y69N+C71S/T, S68N+E70S/T, E70N+W72S/T, W72N+P74S/T, P74N+G76S/T, F75N, G76N+E78T, E78N+K80T, F77T, F77N+G79S/T, G79N+N81S/T, K80N+C82S/T, E83S/T, E83N+D85S/T, L84N+V86S/T, D85N, V86A, V86N+C88S/T, T87N+N89S/T, I90N+N92S/T, K91S/T, I90N+N92S/T, K91N+G93S/T, R94S/T, R94N+E96S/T, K100N, A103S/T, S102N+D104S/T, A103N+N105S/T, D104N+K106S/T, V107S/T, K106N+V108S/T, V108N+V110S/T, S111N, E113N+Y115S/T, G114N+R116S/T, R116N+A118S/T, E119N+Q121S/T, K122S/T, Q121N+S123S/T, K122N+C124S/T S123N+E125S/T, E125N+A125S/T, P126N+V128S/T, A127N+P129T, V128N+F130S/T, P129N+P131S/T, F130N+C132S/T, R134N, V135N+V137S/T, S136N, S138N, V137N+Q139T; Q139N, T140N+L142S/T, S141N+L143S/T, K142N, A146N+A148S/T, E147N+V149S/T, T148N+F150S/T, V149N+P151S/T, F150N+D152S/T, P151N+V153S/T, D152N+D154S/T, V153N+Y155S/T, D154N+V156S/T, Y155N+N157S/T, V156N, S158N+E160S/T, T159N+A161S/T, E160N+E162S/T, A161N, E162N+I164S/T, T163N+L165S/T, I164N+D166S/T, L165N+N167S/T, D166N+I168S/T, I168N+Q170S/T, T169N, Q170N, S171N+Q173S/T, T172N, Q173N+F175S/T, S174N+N176S/T, F175N+D177S/T, F178S/T, D177N, D177E, F178N+R180S/T, T179N+V181S/T, R180N+V182S/T, G183+E185S/T, G184N+D186T, E185N+A187S/T, D186N+K188S/T, A187N+P189T, K188N+G190S/T, P189N+Q181S/T, G200N+V202T, K201N+D203S/T, K201T, V202N+A204S/T, D203N+F205S/T, E213N+W215S/T, K214T, V223T, E224N+G226S/T, T225N+V227S/T, G226N+K228S/T, V227N+I229T, K228N, H236N+I238T; I238N+E240T; E239N, E240N+E242S/T, E242N, T241N+H243S/T, H243N+E245S/T, K247N+N249S/T, V250N+R252T, I251S/T, I251N+I253S/T, R252N+I254S/T, I253N+P255S/T, P255N+H257S/T, H257N+Y259S/T, N260S/T, A262S/T, A261N+I263S/T, A262N+N264S/T, I263N+K265S/T, K265N+N267S/T, A266N+H268S/T, D276N+P278S/T, P278N+V280S/T, E277N+L279S/T, V280N+N282S/T, Y284S/T, S283N+V285S/T, Y284N, D292N+K294S/T, K293N+Y295 S/T, E294N, F299S/T, I298N+L300S/T, K301N+G303S/T, F302N, G303N+G305S/T, S304N+Y306S/T, Y306N+S308S/T, R312N+F314S/T, V313N+H315T, F314N+K316S/T, H315N+G317S/T, K316N+R138S/T, G317N, R318N+A320S/T, S319N+L321S/T, A320N+V322T, L321N+L323 S/T, V322N+Q324S/T, Y325N+R327S/T, R327N+P329S/T, P329N+V331S/T, L330N+D332S/T, D332N+A334S/T, R333N, A334N+C336S/T, T335N+L337S/T, L337N, R338N, S339N+K341T, T340N+F342T; K341N, F342N+I344S/T, T343N+Y345S/T, Y345N+N347S/T, M348S/T, G352N+H354T, F353N, F353N+E355T, H354N+G356S/T, H354V, H354I, E355T, E355N+G357S/T, G356N+R358T, G357N+D359S/T, R358N, Q362N+D364S/T, V370N; T371V; T371I; E372T, E372N+E374S/T, E374N, G375N, W385N+E387T; G386N+E388T, E388N+A390S/T, A390N+K392T, M391N+G393 S/T, K392N+K394S/T, K392V, G393T, G393N+Y395S/T, K394N+G396S/T, R403N+V405S/T, I408S/T, K409N+K411S/T, E410N, K411N+K413S/T, and K413N.

[0442] e. Modifications to Increase Resistance to Proteases

[0443] Modified FIX polypeptides provided herein also can contain additional modifications that result in increased resistance of the polypeptide to proteases. For example, amino acid substitutions can be made that remove one or more potential proteolytic cleavage sites. The modified FIX polypeptides can thus be made more resistant to proteases, thereby increasing the stability and half-life of the modified polypeptide.

[0444] Examples of additional modifications that can be included in the modified FIX polypeptides provided herein to increase resistance to proteases include, but are not limited to, those described in U.S. Patent Publication No. 2008/0102115 and International Application Publication No. WO 2007/149406. Exemplary modifications that can be included in a modified FIX polypeptide provided herein to increase protease resistance include, but are not limited to, Y1H, Y1I, S3Q, S3H, S3N, G4Q, G4H, G4N, K5N, K5Q, L6I, L6V, E7Q, E7H, E7N, E8Q, E8H, E8N, F9I, F9V, V10Q, V10H, V10N, G12Q, G12H, G12N, L141, L14V, E15Q, E15H, E15N, R16H, R16Q, E17Q, E17H, E17N, M19I, M19V, E20Q, E20H, E20N, E21Q, E21H, E21N, K22N, K22Q, S24Q, S24H, S24N, F251, F25V, E26Q, E26H, E26N, E27Q, E27H, E27N, A28Q, A28H, A28N, R29H, R29Q, E30Q, E30H, E30N, V31Q, V31H, V31N, F32I, F32V, E33Q, E33H, E33N, T35Q, T35H, T35N, E36Q, E36H, E36N, R37H, R37Q, T38Q, T38H, T38N, T39Q, T39H, T39N, E40Q, E40H, E40N, F41I, F41V, W42S, W42H, K43N, K43Q, Y45H, Y45I, V46Q, V46H, V46N, D47N, D47Q, G48Q, G48H, G48N, D49N, D49Q, E52Q, E52H, E52N, S53Q, S53H, S53N, P55A, P55S, L57I, L57V, N58Q, N58S, G59Q, G59H, G59N, G60Q, G60H, G60N, S61Q, S61H, S61N, K63N, K63Q, D64N, D64Q, D65N, D65Q, I66Q, I66H, I66N, S68Q, S68H, S68N, Y69H, Y69I, E70Q, E70H, E70N, W72S, W72H, P74A, P74S, F75I, F75V, G76Q, G76H, G76N, F77I, F77V, E78Q, E78H, E78N, G79Q, G79H, G79N, K80N, K80Q, E83Q, E83H, E83N, L84I, L84V, D85N, D85Q, V86Q, V86H, V86N, T87Q, T87H, T87N, I90Q, I90H, I90N, K91N, K91Q, N92Q, N92S, G93Q, G93H, G93N, R94H, R94Q, E96Q, E96H, E96N, F98I, F98V, K100N, K100Q, S102Q, S102H, S102N, A103Q, A103H, A103N, D104N, D104Q, K106N, K106Q, V107Q, V107H, V107N, V108Q, V108H, V108N, S110Q, S110H, S110N, T112Q, T112H, T112N, E113Q, E113H, E113N, G114Q, G114H, G114N, Y115H, Y115I, R116H, R116Q, L117I, L117V, A118Q, A118H, A118N, E119Q, E119H, E119N, K122N, K122Q, S123Q, S123H, S123N, E125Q, E125H, E125N, P126A, P126S, A127Q, A127H, A127N, V128Q, V128H, V128N, P129A, P129S, P131A, P131S, G133Q, G133H, G133N, R134H, R134Q, V135Q, V135H, V135N, S136Q, S136H, S136N, V137Q, V137H, V137N, S138Q, S138H, S138N, T140Q, T140H, T140N, S141Q, S141H, S141N, K142N, K142Q, L143I, L143V, T144Q, T144H, T144N, R145H, R145Q, A146Q, A146H, A146N, E147Q, E147H, E147N, T148Q, T148H, T148N, V149Q, V149H, V149N, P151A, P151S, D152N, D152Q, V153Q, V153H, V153N, D154N, D154Q, Y155H, Y155I, V156Q, V156H, V156N, S158Q, S158H, S158N, T159Q, T159H, T159N, E160Q, E160H, E160N, A161Q, A161H, A161N, E162Q, E162H, E162N, T163Q, T163H, T163N, I164Q, I164H, I164N, L165I, L165V, L165Q, L165H, D166N, D166Q, I168Q, I168H, I168N, T169Q, T169H, T169N, S171Q, S171H, S171N, T172Q, T172H, T172N, S174Q, S174H, S174N, F175I, F175V, F175H, D177N, D177Q, F178I, F178V, F178H, T179Q, T179H, T179N, R180H, R180Q, V181Q, V181H, V181N, V182Q, V182H, V182N, G183Q, G183H, G183N, G184Q, G184H, G184N, E185Q, E185H, E185N, D186N, D186Q, A187Q, A187H, A187N, K188N, K188Q, P189A, P189S, G190Q, G190H, G190N, F192I, F192V, F192IH, P193A, P193S, W194S, W194H, W194I, V196Q, V196H, V196N, V197Q, V197H, V197N, L198I, L198V, L198Q, L198H, N199Q, N199S, G200Q, G200H, G200N, K201N, K201Q, V202Q, V202H, V202N, D203N, D203Q, A204Q, A204H, A204N, F205I, F205V, G207Q, G207H, G207N, G208Q, G208H, G208N, S209Q, S209H, S209N, I210Q, I210H, I210N, V211Q, V211H, V211N, E213Q, E213H, E213N, K214N, K214Q, W215S, W215H, I216Q, I216H, I216N, V217Q, V217H, V217N, T218Q, T218H, T218N, A219Q, A219H, A219N, A220Q, A220H, A220N, V223Q, V223H, V223N, E224Q, E224H, E224N, T225Q, T225H, T225N, G226Q, G226H, G226N, V227Q, V227H, V227N, K228N, K228Q, I229Q, I229H, I229N, T230Q, T230H, T230N, V231Q, V231H, V231N, V232Q, V232H, V232N, A233Q, A233H, A233N, G234Q, G234H, G234N, E235Q, E235H, E235N, I238Q, I238H, I238N, E239Q, E239H, E239N, E240Q, E240H, E240N, T241Q, T241H, T241N, E242Q, E242H, E242N, T244Q, T244H, T244N, E245Q, E245H, E245N, K247N, K247Q, R248H, R248Q, V250Q, V250H, V250N, I251Q, I251H, I251N, R252H, R252Q, I253Q, I253H, I253N, I254Q, I254H, I254N, P255A, P255S, Y259H, Y259I, A261Q, A261H, A261N, A262Q, A262H, A262N, I263Q, I263H, I263N, K265N, K265Q, Y266H, Y266I, D269N, D269Q, I270Q, I270H, I270N, A271Q, A271H, A271N, L272I, L272V, L273I, L273V, E274Q, E274H, E274N, L275I, L275V, D276N, D276Q, E277Q, E277H, E277N, P278A, P278S, L279I, L279V, V280Q, V280H, V280N, L281I, L281V, S283Q, S283H, S283N, Y284H, Y284I, V285Q, V285H, V285N, T286Q, T286H, T286N, P287A, P287S, I288Q, I288H, I288N, I290Q, I290H, I290N, A291Q, A291H, A291N, D292N, D292Q, K293N, K293Q, E294Q, E294H, E294N, Y295H, Y295I, T296Q, T296H, T296N, I298Q, I298H, I298N, F299I, F299V, L300I, L300V, K301N, K301Q, F302I, F302V, G303Q, G303H, G303N, S304Q, S304H, S304N, G305Q, G305H, G305N, Y306H, Y306I, V307Q, V307H, V307N, S308Q, S308H, S308N, G309Q, G309H, G309N, W310S, W310H, G311Q, G311H, G311N, R312H, R312Q, V313Q, V313H, V313N, F314I, F314V, K316N, K316Q, G317Q, G317H, G317N, R318H, R318Q, S319Q, S319H, S319N, A320Q, A320H, A320N, L321I, L321V, V322Q, V322H, V322N, L323I, L323V, Y325H, Y325I, L326I, L326V, R327H, R327Q, V328Q, V328H, V328N, P329A, P329S, L330I, L330V, V331Q, V331H, V331N, D332N, D332Q, R333H, R333Q, A334Q, A334H, A334N, T335Q, T335H, T335N, L337I, L337V, R338H, R338Q, S339Q, S339H, S339N, T340Q, T340H, T340N, K341N, K341Q, F342I, F342V, T343Q, T343H, T343N, I344Q, I344H, I344N, Y345H, Y345I, M348I, M348V, F349I, F349V, A351Q, A351H, A351N, G352Q, G352H, G352N, F353I, F353V, E355Q, E355H, E355N, G356Q, G356H, G356N, G357Q, G357H, G357N, R358H, R358Q, D359N, D359Q, S360Q, S360H, S360N, G363Q, G363H, G363N, D364N, D364Q, S365Q, S365H, S365N, G366Q, G366H, G366N, G367Q, G367H, G367N, P368A, P368S, V370Q, V370H, V370N, T371Q, T371H, T371N, E372Q, E372H, E372N, V373Q, V373H, V373N, E374Q, E374H, E374N, G375Q, G375H, G375N, T376Q, T376H, T376N, S377Q, S377H, S377N, F378I, F378V, L379I, L379V, T380Q, T380H, T380N, G381Q, G381H, G381N, I382Q, I382H, I382N, I383Q, I383H, I383N, S384Q, S384H, S384N, W385S, W385H, G386Q, G386H, G386N, E387Q, E387H, E387N, E388Q, E388H, E388N, A390Q, A390H, A390N, M391I, M391V, K392N, K392Q, G393Q, G393H, G393N, K394N, K394Q, Y395H, Y395I, G396Q, G396H, G396N, I397Q, I397H, I397N, Y398H, Y398I, T399Q, T399H, T399N, K400N, K400Q, V401Q, V401H, V401N, S402Q, S402H, S402N, R403H, R403Q, Y404H, Y404I, V405Q, V405H, V405N, W407S, W407H, I408Q, I408H, I408N, K409N, K409Q, E410Q, E410H, E410N, K411N, K411Q, T412Q, T412H, T412N, K413N, K413Q, L414I, L414V, T415Q, T415H, and T415N (numbering corresponding to a mature FIX polypeptide set forth in SEQ ID NO:3).

[0445] f. Modifications to Reduce Immunogenicity

[0446] Further modifications to a modified FIX polypeptide provided herein can include modifications of at least one amino acid residue resulting in a substantial reduction in activity of or elimination of one or more T-cell epitopes from the protein, i.e., deimmunization of the polypeptide. One or more amino acid modifications at particular positions within any of the MHC class II ligands can result in a deimmunized FIX polypeptide with reduced immunogenicity when administered as a therapeutic to a subject, such as for example, a human subject. For example, any one or more modifications disclosed in U.S. Patent Publication No. 2004/0254106 can be included in the modified FIX polypeptide provided herein to reduce immunogenicity.

[0447] Exemplary amino acid modifications that can contribute to reduced immunogenicity of a FIX polypeptide include any one or more amino acid modifications corresponding to any one or more of the following modifications: Y1A, Y1C, Y1D, Y1E, Y1G, Y1H, Y1K, Y1N, Y1P, Y1Q, Y1R, Y1S, Y1T, S3T, L6A, L6C, L6D, L6E, L6G, L6H, L6K, L6N, L6P, L6Q, L6R, L6S, L6T, L6M, F9A, F9C, F9D, F9E, F9G, F9H, F9K, F9N, F9P, F9Q, F9R, F9S, F9T, F9I, F9M, F9W, V10A, V10C, V10D, V10E, V10G, V10H, V10K, V10N, V10P, V10Q, V10R, V10S, V10T, V10F, V10I, V10M, V10W, V10Y, Q11A, Q11C, Q11G, Q11P, G12D, G12E, G12G, G12H, G12K, G12N, G12P, G12Q, G12R, G12S, G12T, N13A, N13C, N13G, N13H, N13P, N13T, L14A, L14C, L14D, L14E, L14G, L14H, L14K, L14N, L14P, L14Q, L14R, L14S, L14T, L14F, L14I, L14M, L14V, L14W, L14Y, E15D, E15H, E15P, R16A, R16C, R16G, R16P, R16T, E17A, E17C, E17G, E17P, E17T, C18D, C18E, C18G, C18H, C18K, C18N, C18P, C18Q, C18R, C18S, C18T, M19A, M19C, M19D, M19E, M19G, M19H, M19K, M19N, M19P, M19Q, M19R, M19S, M19T, M19F, M19I, M19M, M19V, M19W, M19Y, E20A, E20C, E20G, E20P, E20T, E21A, E21C, E21G, E21P, K22H, K22P, K22T, S24H, S24P, F25A, F25C, F25D, F25E, F25G, F25H, F25K, F25N, F25P, F25Q, F25R, F25S, F25T, F25I, F25M, F25W, F25Y, E26A, E26C, E26G, E26P, E27A, E27C, E27G, E27H, E27P, E27S, E27T, A28C, A28D, A28E, A28G, A28H, A28K, A28N, A28P, A28Q, A28R, A28S, A28T, R29A, R29C, R29G, R29P, E30D, E30H, E30P, V31A, V31C, V31D, V31E, V31G, V31H, V31K, V31N, V31P, V31Q, V31R, V31S, V31T, V31F, V31I, V31W, V31Y, F32A, F32C, F32D, F32E, F32G, F32H, F32K, F32N, F32P, F32Q, F32R, F32S, F32T, E33H, E33N, E33P, E33Q, E33S, E33T, T35A, T35C, T35G, T35P, F41A, F41C, F41D, F41E, F41G, F41H, F41K, F41N, F41P, F41Q, F41R, F41S, F41T, F41M, F41W, F41Y, W42A, W42C, W42D, W42E, W42G, W42H, W42K, W42N, W42P, W42Q, W42R, W42S, W42T, K43A, K43C, K43G, K43P, Q44P, Q44T, Q44, Y45A, Y45C, Y45D, Y45E, Y45G, Y45H, Y45K, Y45N, Y45P, Y45Q, Y45R, Y45S, Y45T, V46A, V46C, V46D, V46E, V46G, V46H, V46K, V46N, V46P, V46Q, V46R, V46S, V46T, V46F, V46I, V46M, V46W, V46Y, D47A, D47C, D47G, D47H, D47P, D47T, G48D, G48E, G48P, G48T, D49H, D49P, D49Q, D49T, Q50A, Q50C, Q50D, Q50G, Q50H, Q50P, Q50T, C51D, C51E, C51G, C51H, C51K, C51N, C51P, C51Q, C51R, C51S, C51T, E52P, E52T, S53A, S53C, S53G, S53H, S53P, S53T, N54H, N54P, N54T, L57A, L57C, L57D, L57E, L57G, L57H, L57K, L57N, L57P, L57Q, L57R, L57S, L57T, L57F, L57I, L57M, L57W, L57Y, G60C, G60D, G60H, G60P, G60T, C62D, C62H, C62P, K63T, D65H, D65T, I66A, I66C, I66D, I66E, I66G, I66H, I66K, I66N, I66P, I66Q, I66R, I66S, I66T, I66M, I66W, I66Y, Y69A, Y69C, Y69D, Y69E, Y69G, Y69H, Y69K, Y69N, Y69P, Y69Q, Y69R, Y69S, Y69T, C71H, C71P, W72A, W72C, W72D, W72E, W72G, W72H, W72K, W72N, W72P, W72Q, W72R, W72S, W72T, W72I, W72Y, F75A, F75C, F75D, F75E, F75G, F75H, F75K, F75N, F75P, F75Q, F75R, F75S, F75T, F77A, F77C, F77D, F77E, F77G, F77H, F77K, F77N, F77P, F77Q, F77R, F77S, F77T, L84A, L84C, L84D, L84E, L84G, L84H, L84K, L84N, L84P, L84Q, L84R, L84S, L84T, L84M, L84W, L84Y, V86A, V86C, V86D, V86E, V86G, V86H, V86K, V86N, V86P, V86Q, V86R, V86S, V86T, I90A, I90C, I90D, I90E, I90G, I90H, I90K, I90N, I90P, I90Q, I90R, I90S, I90T, I90M, I90W, K91A, K91C, K91G, K91P, N92A, N92C, N92G, N92P, N92T, G93D, G93E, G93H, G93K, G93N, G93P, G93Q, G93R, G93S, G93T, R94A, R94C, R94G, R94P, C95D, C95E, C95G, C95H, C95K, C95N, C95P, C95Q, C95R, C95S, C95T, E96P, E96T, Q97A, Q97C, Q97G, Q97P, F98A, F98C, F98D, F98E, F98G, F98H, F98K, F98N, F98P, F98Q, F98R, F98S, F98T, F98M, F98W, F98Y, K100A, K100C, K100G, K100P, N101H, N101T, A103D, A103E, A103H, A103K, A103N, A103P, A103Q, A103R, A103S, A103T, D104T, K106H, K106P, K106T, V107A, V107C, V107D, V107E, V107G, V107H, V107K, V107N, V107P, V107Q, V107R, V107S, V107T, V108A, V108C, V108D, V108E, V108G, V108H, V108K, V108N, V108P, V108Q, V108R, V108S, V108T, V108F, V108M, V108W, V108Y, S110A, S110C, S110G, S110P, C111D, C111E, C111H, C111K, C111N, C111P, C111Q, C111R, C111S, C111T, T112A, T112C, T112G, T112P, E113D, E113H, E113P, G114D, G114E, G114H, G114K, G114N, G114P, G114Q, G114R, G114S, G114T, Y115A, Y115C, Y115D, Y115E, Y115G, Y115H, Y115K, Y115N, Y115P, Y115Q, Y115R, Y115S, Y115T, Y115M, Y115W, R116P, R116T, L117A, L117C, L117D, L117E, L117G, L117H, L117K, L117N, L117P, L117Q, L117R, L117S, L117T, A118D, A118E, A118H, A118K, A118N, A118P, A118Q, A118R, A118S, A118T, N120D, N120H, N120P, Q121T, S123H, S123T, V128A, V128C, V128D, V128E, V128G, V128H, V128K, V128N, V128P, V128Q, V128R, V128S, V128T, F130A, F130C, F130D, F130E, F130G, F130H, F130K, F130N, F130P, F130Q, F130R, F130S, F130T, V135A, V135C, V135D, V135E, V135G, V135H, V135K, V135N, V135P, V135Q, V135R, V135S, V135T, V135W, V135Y, V137A, V137C, V137D, V137E, V137G, V137H, V137K, V137N, V137P, V137Q, V137R, V137S, V137T, V137M, V137W, V137Y, S138H, S138T, T140D, T140H, S141T, K142H, K142P, L143A, L143C, L143D, L143E, L143G, L143H, L143K, L143N, L143P, L143Q, L143R, L143S, L143T, L143F, L143I, L143M, L143V, L143W, L143Y, R145H, R145P, R145T, A146P, A146T, T148H, T148P, V149A, V149C, V149D, V149E, V149G, V149H, V149K, V149N, V149P, V149Q, V149R, V149S, V149T, V149F, V149I, V149M, V149W, V149Y, F150A, F150C, F150D, F150E, F150G, F150H, F150K, F150N, F150P, F150Q, F150R, F150S, F150T, F150M, F150W, F150Y, D152A, D152C, D152G, D152P, D152S, D152T, V153A, V153C, V153D, V153E, V153G, V153H, V153K, V153N, V153P, V153Q, V153R, V153S, V153T, V153F, V153I, V153M, V153W, V153Y, D154A, D154C, D154G, D154P, D154Q, D154S, Y155A, Y155C, Y155D, Y155E, Y155G, Y155H, Y155K, Y155N, Y155P, Y155Q, Y155R, Y155S, Y155T, Y155M, Y155V, Y155W, V156A, V156C, V156D, V156E, V156G, V156H, V156K, V156N, V156P, V156Q, V156R, V156S, V156T, V156I, V156M, V156W, V156Y, N157A, N157C, N157G, N157H, N157P, N157Q, N157T, S158H, S158P, S158T, T159A, T159C, T159G, T159P, E160A, E160C, E160G, E160P, A161C, A161D, A161E, A161H, A161K, A161N, A161P, A161Q, A161R, A161S, A161T, E162P, E162T, T163A, T163C, T163G, T163P, I164A, I164C, I164D, I164E, I164G, I164H, I164K, I164N, I164P, I164Q, I164R, I164S, I164T, L165A, L165C, L165D, L165E, L165G, L165H, L165K, L165N, L165P, L165Q, L165R, L165S, L165T, L165M, L165W, L165Y, I168A, I168C, I168D, I168E, I168G, I168H, I168K, I168N, I168P, I168Q, I168R, I168S, I168T, F175A, F175C, F175D, F175E, F175G, F175H, F175K, F175N, F175P, F175Q, F175R, F175S, F175T, F178A, F178C, F178D, F178E, F178G, F178H, F178K, F178N, F178P, F178Q, F178R, F178S, F178T, F178M, F178W, F178Y, T179A, T179C, T179G, T179P, R180A, R180C, R180D, R180G, R180H, R180P, V181A, V181C, V181D, V181E, V181G, V181H, V181K, V181N, V181P, V181Q, V181R, V181S, V181T, V181F, V181I, V181M, V181W, V181Y, V182A, V182C, V182D, V182E, V182G, V182H, V182K, V182N, V182P, V182Q, V182R, V182S, V182T, V182F, V182I, V182M, V182W, V182Y, G183D, G183E, G183H, G183K, G183N, G183P, G183Q, G183S, G183T, G184D, G184E, G184H, G184K, G184N, G184P, G184Q, G184R, G184S, G184T, E185A, E185C, E185G, E185H, E185P, E185T, D186A, D186C, D186G, D186H, D186P, D186T, A187C, A187D, A187E, A187G, A187H, A187K, A187N, A187P, A187Q, A187R, A187S, A187T, K188A, K188C, K188G, K188H, K188P, K188T, G190D, G190E, G190H, G190K, G190N, G190P, G190Q, G190R, G190S, G190T, F192A, F192C, F192D, F192E, F192G, F192H, F192K, F192N, F192P, F192Q, F192R, F192S, F192T, F192W, F192Y, W194A, W194C, W194D, W194E, W194G, W194H, W194K, W194N, W194P, W194Q, W194R, W194S, W194T, Q195H, Q195P, Q195T, V196A, V196C, V196D, V196E, V196G, V196H, V196K, V196N, V196P, V196Q, V196R, V196S, V196T, V196F, V1961, V196M, V196W, V196Y, V197A, V197C, V197D, V197E, V197G, V197H, V197K, V197N, V197P, V197Q, V197R, V197S, V197T, V197F, V197I, V197M, V197W, V197Y, L198A, L198C, L198D, L198E, L198G, L198H, L198K, L198N, L198P, L198Q, L198R, L198S, L198T, L198I, L198Y, N199A, N199C, N199G, N199H, N199P, N199S, N199T, G200P, G200T, K201A, K201C, K201D, K201E, K201G, K201H, K201N, K201P, K201Q, K201S, K201T, V202A, V202C, V202D, V202E, V202G, V202H, V202K, V202N, V202P, V202Q, V202R, V202S, V202T, V202F, V202I, V202M, V202W, V202Y, D203A, D203C, D203G, D203P, D203T, A204C, A204D, A204E, A204G, A204H, A204K, A204N, A204P, A204Q, A204R, A204S, A204T, F205A, F205C, F205D, F205E, F205G, F205H, F205K, F205N, F205P, F205Q, F205R, F205S, F205T, F205M, F205V, F205W, F205Y, G207H, G207P, G208C, G208D, G208E, G208H, G208K, G208N, G208P, G208Q, G208R, G208S, G208T, S209A, S209C, S209G, S209P, I210A, I210C, I210D, I210E, I210G, I210H, I210K, I210N, I210P, I210Q, I210R, I210S, I210T, I210F, I210W, I210Y, V211A, V211C, V211D, V211E, V211G, V211H, V211K, V211N, V211P, V211Q, V211R, V211S, V211T, V211F, V211I, V211M, V211W, N212A, N212C, N212G, N212P, E213H, E213P, E213S, E213T, K214T, W215A, W215C, W215D, W215E, W215G, W215H, W215K, W215N, W215P, W215Q, W215R, W215S, W215T, I216A, I216C, I216D, I216E, I216G, I216H, I216K, I216N, I216P, I216Q, I216R, I216S, I216T, V217A, V217C, V217D, V217E, V217G, V217H, V217K, V217N, V217P, V217Q, V217R, V217S, V217T, V2171, V217Y, A219H, A219P, A219T, V223A, V223C, V223D, V223E, V223G, V223H, V223K, V223N, V223P, V223Q, V223R, V223S, V223T, V223M, V223W, V223Y, G226P, V227A, V227C, V227D, V227E, V227G, V227H, V227K, V227N, V227P, V227Q, V227R, V227S, V227T, V227F, V2271, V227M, V227W, V227Y, K228A, K228C, K228G, K228H, K228P, I229A, I229C, I229D, I229E, I229G, I229H, I229K, I229N, I229P, I229Q, I229R, I229S, I229T, I229M, I229W, I229Y, T230A, T230C, T230G, T230P, V231A, V231C, V231D, V231E, V231G, V231H, V231K, V231N, V231P, V231Q, V231R, V231S, V231T, V232A, V232C, V232D, V232E, V232G, V232H, V232K, V232N, V232P, V232Q, V232R, V232S, V232T, V232F, V2321, V232M, V232W, V232Y, A233C, A233D, A233E, A233G, A233H, A233K, A233N, A233P, A233Q, A233R, A233S, A233T, A233V, G234D, G234E, G234H, G234K, G234N, G234P, G234Q, G234R, G234S, G234T, E235H, E235N, E235P, E235Q, E235S, E235T, H236A, H236C, H236G, H236P, N237A, N237C, N237G, N237P, N237T, I238A, I238C, I238D, I238E, I238G, I238H, I238K, I238N, I238P, I238Q, I238R, I238S, I238T, E239A, E239C, E239G, E239P, E240H, E240T, V250A, V250C, V250D, V250E, V250G, V250H, V250K, V250N, V250P, V250Q, V250R, V250S, V250T, V250M, V250W, V250Y, I251A, I251C, I251D, I251E, I251G, I251H, I251K, I251N, I251P, I251Q, I251R, I251S, I251T, I253A, I253C, I253D, I253E, I253G, I253H, I253K, I253N, I253P, I253Q, I253R, I253S, I253T, I253M, I253W, I253Y, I254A, I254C, I254D, I254E, I254G, I254H, I254K, I254N, I254P, I254Q, I254R, I254S, I254T, P255H, H256P, H256T, H257A, H257C, H257G, H257P, N258P, N258T, Y259A, Y259C, Y259D, Y259E, Y259G, Y259H, Y259K, Y259N, Y259P, Y259Q, Y259R, Y259S, Y259T, Y259M, Y259W, N260A, N260C, N260G, N260P, A261D, A261E, A261H, A261K, A261N, A261P, A261Q, A261R, A261S, A261T, A262C, A262D, A262E, A262G, A262H, A262K, A262N, A262P, A262Q, A262R, A262S, A262T, I263A, I263C, I263D, I263E, I263G, I263H, I263K, I263N, I263P, I263Q, I263R, I263S, I263T, I263M, I263V, I263W, I263Y, N264A, N264C, N264D, N264G, N264H, N264P, K265A, K265C, K265G, K265H, K265P, Y266A, Y266C, Y266D, Y266E, Y266G, Y266H, Y266K, Y266N, Y266P, Y266Q, Y266R, Y266S, Y266T, Y266M, Y266W, N267A, N267C, N267G, N267H, N267P, N267T, H268P, D269A, D269C, D269E, D269G, D269H, D269N, D269P, D269Q, D269S, D269T, I270A, I270C, I270D, I270E, I270G, I270H, I270K, I270N, I270P, I270Q, I270R, I270S, I270T, I270M, I270W, A271C, A271D, A271E, A271G, A271H, A271K, A271N, A271P, A271Q, A271R, A271S, A271T, L272A, L272C, L272D, L272E, L272G, L272H, L272K, L272N, L272P, L272Q, L272R, L272S, L272T, L272F, L273A, L273C, L273D, L273E, L273G, L273H, L273K, L273N, L273P, L273Q, L273R, L273S, L273T, L273F, L273I, L273M, L273V, L273W, L273Y, E274A, E274C, E274G, E274P, E274T, L275A, L275C, L275D, L275E, L275G, L275H, L275K, L275N, L275P, L275Q, L275R, L275S, L275T, L275W, L275Y, D276P, D276S, D276T, E277A, E277C, E277G, E277P, P278T, L279A, L279C, L279D, L279E, L279G, L279H, L279K, L279N, L279P, L279Q, L279R, L279S, L279T, L279I, L279Y, V280A, V280C, V280D, V280E, V280G, V280H, V280K, V280N, V280P, V280Q, V280R, V280S, V280T, V280F, V280I, V280W, V280Y, L281A, L281C, L281D, L281E, L281G, L281H, L281K, L281N, L281P, L281Q, L281R, L281S, L281T, L281F, L281I, L281V, L281W, L281Y, S283A, S283C, S283G, S283P, Y284A, Y284C, Y284D, Y284E, Y284G, Y284H, Y284K, Y284N, Y284P, Y284Q, Y284R, Y284S, Y284T, Y284M, V285A, V285C, V285D, V285E, V285G, V285H, V285K, V285N, V285P, V285Q, V285R, V285S, V285T, V285M, V285W, V285Y, T286A, T286C, T286G, T286P, I288A, I288C, I288D, I288E, I288G, I288H, I288K, I288N, I288P, I288Q, I288R, I288S, I288T, C289D, C289H, C289P, I290A, I290C, I290D, I290E, I290G, I290H, I290K, I290N, I290P, I290Q, I290R, I290S, I290T, I290Y, A291D, A291E, A291H, A291K, A291N, A291P, A291Q, A291R, A291S, A291T, D292A, D292C, D292G, D292P, D292T, K293H, K293P, K293T, Y295A, Y295C, Y295D, Y295E, Y295G, Y295H, Y295K, Y295N, Y295P, Y295Q, Y295R, Y295S, Y295T, Y295W, T296A, T296C, T296G, T296P, N297A, N297C, N297G, N297P, I298A, I298C, I298D, I298E, I298G, I298H, I298K, I298N, I298P, I298Q, I298R, I298S, I298T, F299A, F299C, F299D, F299E, F299G, F299H, F299K, F299N, F299P, F299Q, F299R, F299S, F299T, L300A, L300C, L300D, L300E, L300G, L300H, L300K, L300N, L300P, L300Q, L300R, L300S, L300T, L300F, L300I, L300M, L300V, L300W, L300Y, K301A, K301C, K301G, K301P, K301T, F302A, F302C, F302D, F302E, F302G, F302H, F302K, F302N, F302P, F302Q, F302R, F302S, F302T, G303H, G303P, G303T, S304A, S304C, S304G, S304P, S304T, G305D, G305E, G305H, G305N, G305P, G305Q, G305S, G305T, Y306A, Y306C, Y306D, Y306E, Y306G, Y306H, Y306K, Y306N, Y306P, Y306Q, Y306R, Y306S, Y306T, V307A, V307C, V307D, V307E, V307G, V307H, V307K, V307N, V307P, V307Q, V307R, V307S, V307T, S308P, S308T, W310A, W310C, W310D, W310E, W310G, W310H, W310K, W310N, W310P, W310Q, W310R, W310S, W310T, G311H, V313A, V313C, V313D, V313E, V313G, V313H, V313K, V313N, V313P, V313Q, V313R, V313S, V313T, F314A, F314C, F314D, F314E, F314G, F314H, F314K, F314N, F314P, F314Q, F314R, F314S, F314T, F314M, F314W, F314Y, H315A, H315C, H315G, H315P, K316A, K316C, K316G, K316P, G317C, G317D, G317E, G317H, G317K, G317N, G317P, G317Q, G317R, G317S, G317T, R318A, R318C, R318G, R318P, S319D, S319H, S319N, S319P, S319Q, A320C, A320D, A320E, A320G, A320H, A320K, A320N, A320P, A320Q, A320R, A320S, A320T, L321A, L321C, L321D, L321E, L321G, L321H, L321K, L321N, L321P, L321Q, L321R, L321S, L321T, V322A, V322C, V322D, V322E, V322G, V322H, V322K, V322N, V322P, V322Q, V322R, V322S, V322T, V322W, V322Y, L323A, L323C, L323D, L323E, L323G, L323H, L323K, L323N, L323P, L323Q, L323R, L323S, L323T, L323F, L323I, L323M, L323V, L323W, L323Y, Q324A, Q324C, Q324G, Q324P, Y325A, Y325C, Y325D, Y325E, Y325G, Y325H, Y325K, Y325N, Y325P, Y325Q, Y325R, Y325S, Y325T, Y325W, L326A, L326C, L326D, L326E, L326G, L326H, L326K, L326N, L326P, L326Q, L326R, L326S, L326T, L326F, L326I, L326M, L326V, L326W, L326Y, R327A, R327C, R327G, R327H, R327P, V328A, V328C, V328D, V328E, V328G, V328H, V328K, V328N, V328P, V328Q, V328R, V328S, V328T, V328F, V328I, V328M, V328W, V328Y, L330A, L330C, L330D, L330E, L330G, L330H, L330K, L330N, L330P, L330Q, L330R, L330S, L330T, L330F, L330I, L330V, L330W, L330Y, V331A, V331C, V331D, V331E, V331G, V331H, V331K, V331N, V331P, V331Q, V331R, V331S, V331T, V331F, V331I, V331M, V331W, V331Y, D332A, D332C, D332G, D332P, R333A, R333C, R333D, R333E, R333G, R333H, R333N, R333P, R333Q, R333R, R333S, R333T, A334C, A334D, A334E, A334G, A334H, A334K, A334N, A334P, A334Q, A334R, A334S, A334T, T335A, T335C, T335G, T335P, C336D, C336E, C336H, C336K, C336N, C336P, C336Q, C336R, C336S, C336T, L337A, L337C, L337D, L337E, L337G, L337H, L337K, L337N, L337P, L337Q, L337R, L337S, L337T, R338A, R338C, R338G, R338P, S339P, S339T, K341A, K341C, K341G, K341P, F342A, F342C, F342D, F342E, F342G, F342H, F342K, F342N, F342P, F342Q, F342R, F342S, F342T, F342M, F342W, T343A, T343C, T343G, T343P, I344A, I344C, I344D, I344E, I344G, I344H, I344K, I344N, I344P, I344Q, I344R, I344S, I344T, Y345A, Y345C, Y345D, Y345E, Y345G, Y345H, Y345K, Y345N, Y345P, Y345Q, Y345R, Y345S, Y345T, Y345M, Y345W, N346A, N346C, N346G, N346P, N347H, N347P, M348A, M348C, M348D, M348E, M348G, M348H, M348K, M348N, M348P, M348Q, M348R, M348S, M348T, F349A, F349C, F349D, F349E, F349G, F349H, F349K, F349N, F349P, F349Q, F349R, F349S, F349T, F349I, F349M, F349W, F349Y, C350D, C350H, C350P, C350T, A351E, A351H, A351N, A351P, A351Q, A351R, A351S, A351T, G352A, G352C, G352P, F353A, F353C, F353D, F353E, F353G, F353H, F353K, F353N, F353P, F353Q, F353R, F353S, F353T, F353I, F353M, F353W, H354A, H354C, H354G, H354P, E355A, E355C, E355D, E355G, E355H, E355K, E355N, E355P, E355Q, E355S, E355T, G356D, G356E, G356H, G356K, G356N, G356P, G356Q, G356R, G356S, G356T, G357D, G357E, G357H, G357K, G357N, G357P, G357Q, G357R, G357S, G357T, R358D, R358E, R358H, R358K, R358N, R358P, R358Q, R358R, R358S, R358T, D359A, D359C, D359G, D359P, D359Q, D359S, D359T, S360A, S360C, S360G, S360P, C361D, C361E, C361H, C361K, C361N, C361P, C361Q, C361R, C361S, C361T, V370A, V370C, V370D, V370E, V370G, V370H, V370K, V370N, V370P, V370Q, V370R, V370S, V370T, V370W, V370Y, V373A, V373C, V373D, V373E, V373G, V373H, V373K, V373N, V373P, V373Q, V373R, V373S, V373T, V373F, V373I, V373M, V373W, E374A, E374C, E374G, E374P, G375H, S377A, S377C, S377G, S377P, F378A, F378C, F378D, F378E, F378G, F378H, F378K, F378N, F378P, F378Q, F378R, F378S, F378T, F378W, L379A, L379C, L379D, L379E, L379G, L379H, L379K, L379N, L379P, L379Q, L379R, L379S, L379T, L379I, L379M, L379W, L379Y, T380A, T380C, T380G, T380P, G381D, G381E, G381H, G381K, G381N, G381P, G381Q, G381R, G381S, G381T, I382A, I382C, I382D, I382E, I382G, I382H, I382K, I382N, I382P, I382Q, I382R, I382S, I382T, I382M, I382W, I382Y, I383A, I383C, I383D, I383E, I383G, I383H, I383K, I383N, I383P, I383Q, I383R, I383S, I383T, S384A, S384C, S384G, S384P, W385A, W385C, W385D, W385E, W385G, W385H, W385K, W385N, W385P, W385Q, W385R, W385S, W385T, W385M, E387A, E387C, E387G, E387H, E387P, E387T, E388H, E388N, E388P, E388Q, E388T, A390C, A390D, A390E, A390G, A390H, A390K, A390N, A390P, A390Q, A390R, A390S, M391A, M391C, M391D, M391E, M391G, M391H, M391K, M391N, M391P, M391Q, M391R, M391S, M391T, M391F, M391I, M391W, M391Y, K392A, K392C, K392G, K392P, G393C, G393D, G393E, G393H, G393K, G393N, G393P, G393Q, G393R, G393S, G393T, Y395A, Y395C, Y395D, Y395E, Y395G, Y395H, Y395K, Y395N, Y395P, Y395Q, Y395R, Y395S, Y395T, Y398A, Y398C, Y398D, Y398E, Y398G, Y398H, Y398K, Y398N, Y398P, Y398Q, Y398R, Y398S, Y398T, K400H, V401A, V401C, V401D, V401E, V401G, V401H, V401K, V401N, V401P, V401Q, V401R, V401S, V401T, V401F, V401I, V401M, V401W, V401Y, S402A, S402C, S402G, S402P, R403A, R403C, R403G, R403P, R403T, Y404A, Y404C, Y404D, Y404E, Y404G, Y404H, Y404K, Y404N, Y404P, Y404Q, Y404R, Y404S, Y404T, V405A, V405C, V405D, V405E, V405G, V405H, V405K, V405N, V405P, V405Q, V405R, V405S, V405T, V405W, V405Y, N406F, N406H, N406I, N406L, N406P, N406W, N406Y, W407D, W407E, W407F, W407H, W407I, W407K, W407N, W407P, W407Q, W407R, W407S, W407T, W407Y, I408D, I408E, I408H, I408K, I408N, I408P, I408Q, I408R, I408S, I408T, K409F, K409H, K409I, K409P, K409T, K409V, K409W, K409Y, E410H, K411A, K411C, K411G, K411I, K411P, K411T, K411V, K411W, K411Y, or K413T, with numbering corresponding to a mature FIX polypeptide set forth in SEQ ID NO: 3.

[0448] g. Exemplary Combination Modifications

[0449] Provided herein are modified FIX polypeptides that have two or more modifications designed to affect one or more properties or activities of an unmodified FIX polypeptide. In some examples, the two or more modifications alter two or more properties or activities of the FIX polypeptide. The modifications can be made to the FIX polypeptides such that one or more of glycosylation, resistance to AT-III, resistance to AT-III/heparin, resistance to heparin, catalytic activity, binding to LRP, intrinsic activity, phospholipid binding and/or affinity, resistance to proteases, half-life and interaction with other factors or molecules, such as FVIIIa and FX, is altered. Typically, the two or more modifications are combined such that the resulting modified FIX polypeptide has increased coagulant activity, increased duration of coagulant activity, and/or an enhanced therapeutic index compared to an unmodified FIX polypeptide. The modifications can include amino acid substitution, insertion or deletion. The increased coagulant activity, increased duration of coagulant activity, and/or an enhanced therapeutic index of the modified FIX polypeptide containing two or more modifications can be increased by at least or at least about 1%, 2%, 3%, 4%, 5%, 6%, 7%, 8%, 9%, 10%, 20%, 30%, 40%, 50%, 60%, 70%, 80%, 90%, 100%, 110%, 120%, 130%, 140%, 150%, 160%, 170%, 180%, I90%, 200%, 300%, 400%, 500%, or more compared to the activity of the starting or unmodified FIXa polypeptide.

[0450] Provided herein are modified FIX polypeptides that contain two or more modifications that are introduced into an unmodified FIX polypeptide to alter one, two or more activities or properties. The modified FIX polypeptides can contain 2, 3, 4, 5, 6 or more modifications. For example, a modified FIX polypeptide provided herein can contain the modifications to increase glycosylation by incorporating a non-native glycosylation site into the primary sequence, such as amino acid substitutions D203N and F205T, to introduce a non-native glycosylation site at position 203, and a modification to increase resistance to AT-III/heparin, such as R338E (residues corresponding to a mature FIX polypeptide set forth in SEQ ID NO:3).

[0451] Modified FIX polypeptides provided herein can have two or more modifications selected solely from those set forth in Tables 3-9. In other examples, the modified FIX polypeptide contains two or more modifications where one or more modifications are selected from those set forth in Tables 3-9 and one or more modifications are additional modifications that are not set forth in Tables 3-9, such as, for example, modifications described in the art. In some examples, the one or more additional modifications can be selected from those set forth in Section D.3.a-f, above, such as those that result in increased catalytic activity, increased resistance to inhibitors, increased affinity and/or binding to platelets and phospholipids, increased protease resistance, decreased immunogenicity, and those that facilitate conjugation to moieties, such as PEG moieties.

[0452] Non-limiting exemplary combination modifications are provided in Table 12. These exemplary combination modifications include two or more modifications that are designed to alter two or more activities or properties of a FIX polypeptide, including, but not limited to, increased resistance to AT-III, increased resistance to AT-III/heparin, increased resistance to heparin, increased catalytic activity and altered glycosylation. Modified FIX polypeptides containing such combination modifications can have increased coagulant activity, increased duration of coagulant activity, and/or an enhanced therapeutic index. In Table 12 below, the sequence identifier (SEQ ID NO) is identified in which exemplary amino acid sequences of the modified FIX polypeptide are set forth.

TABLE 12

| Mutation | Mutation | SEQ |
|---|---|---|
| (Mature FIX | (Chymotrypsin | ID |
| Numbering) | Numbering) | NO. |
| R318Y/E410N | R150Y/E240N | 153 |
| R338E/E410N | R170E/E240N | 154 |
| R338E/R403E/E410N | R170E/R233E/E240N | 155 |
| D203N/F205T/K228N | D39N/F41T/K63N | 157 |
| D203N/F205T/E410N | D39N/F41T/E240N | 158 |
| D203N/F205T/R338E | D39N/F41T/R170E | 159 |
| D203N/F205T/R338A | D39N/F41T/R170A | 160 |
| D203N/F205T/R318Y | D39N/F41T/R150Y | 161 |
| D203N/F205T/R338E/R403E | D39N/F41T/R170E/R233E | 162 |
| K228N/E410N | K63N/E240N | 163 |
| K228N/R338E | K63N/R170E | 164 |
| K228N/R338A | K63N/R170A | 165 |
| K228N/R318Y | K63N/R150Y | 166 |
| K228N/R338E/R403E | K63N/R170E/R233E | 167 |
| R403E/E410N | R233E/E240N | 168 |
| R318Y/R338E/E410N | R150Y/R170E/E240N | 169 |
| K228N/R318Y/E410N | K63N/R150Y/E240N | 170 |
| R318Y/R403E/E410N | R150Y/R233E/E240N | 171 |
| R318Y/R338E/R403E/E410N | R150Y/R170E/R233E/E240N | 172 |
| D203N/F205T/R318Y/E410N | D39N/F41T/R150Y/E240N | 173 |
| F314N/K316S | F145N/K148S | 177 |
| A103N/N105S/K228N | A[103]N/N[105]S/K63N | 217 |
| D104N/K106S/K228N | D[104]N/K[106]S/K63N | 218 |
| K228N/I251S | K63N/I86S | 180 |
| A103N/N105S/I251S | A[103]N/N[105]S/I86S | 181 |
| D104N/K106S/I251S | D[104]N/K[106]S/I86S | 182 |
| A103N/N105S/R318Y/R338E/R403E/ | A[103]N/N[105]S/R150Y/R170E/ | 219 |
| E410N | R233E/E240N | |
| D104N/K106S/R318Y/R338E/R403E/ | D[104]N/K[106]S/R150Y/R170E/ | 220 |
| E410N | R233E/E240N | |
| K228N/R318Y/R338E/R403E/E410N | K63N/R150Y/R170E/R233E/E240N | 221 |
| I251S/R318Y/R338E/R403E/E410N | I86S/R150Y/R170E/R233E/E240N | 222 |
| D104N/K106S/I251S/R318Y/R338E/ | D[104]N/K[106]S/I86S/R150Y/ | 223 |
| R403E/E410N | R170E/R233E/E240N | |
| D104N/K106S/R318Y/R338E/E410N | D[104]N/K[106]S/R150Y/R170E/ | 224 |
| | E240N | |
| I251S/R318Y/R338E/E410N | I86S/R150Y/R170E/E240N | 225 |
| D104N/K106S/I251S/R318Y/R338E/ | D[104]N/K[106]S/I86S/R150Y/ | 226 |
| E410N | R170E/E240N | |
| A103N/N105S/K247N/N249S | A[103]N/N[105]S/K82N/N84S | 178 |
| D104N/K106S/K247N/N249S | D[104]N/K[106]S/K82N/N84S | 179 |
| K228N/K247N/N249S | K63N/K82N/N84S | 183 |
| A103N/N105S/Y155F | A[103]N/N[105]S/Y[155]F | 227 |
| D104N/K106S/Y155F | D[104]N/K[106]S/Y[155]F | 228 |
| Y155F/K228N | Y[155]F/K63N | 229 |
| Y155F/I251S | Y[155]F/I86S | 230 |
| Y155F/K247N/N249S | Y[155]F/K82N/N84S | 231 |
| A103N/N105S/K247N/N249S/R318Y/ | A[103]N/N[105]S/K82N/N84S/ | 232 |
| R338E/R403E/E410N | R150Y/R170E/R233E/E240N | |
| D104N/K106S/K247N/N249S/R318Y/ | D[104]N/K[106]S/K82N/N84S/ | 233 |
| R338E/R403E/E410N | R150Y/R170E/R233E/E240N | |
| K228N/K247N/N249S/R318Y/R338E/ | K63N/K82N/N84S/R150Y/R170E/R233E/E240N | 234 |
| R403E/E410N | | |
| A103N/N105S/Y155F/R318Y/R338E/ | A[103]N/N[105]S/Y[155]F/ | 235 |
| R403E/E410N | R150Y/R170E/R233E/E240N | |
| D104N/K106S/Y155F/R318Y/R338E | D[104]N/K[106]S/Y[155]F/ | 236 |
| /R403E/E410N | R150Y/R170E/R233E/E240N | |
| Y155F/K228N/R318Y/R338E/R403E/ | Y[155]F/K63N/R150Y/R170E/R233E/E240N | 237 |
| E410N | | |
| Y155F/I251S/R318Y/R338E/ | Y[155]F/I86S/R150Y/R170E/R233E/E240N | 238 |
| R403E/E410N | | |
| Y155F/K247N/N249S/R318Y/R338E/ | Y[155]F/K82N/N84S/R150Y/R170E/R233E/ | 239 |
| R403E/E410N | E240N | |
| K247N/N249S/R318Y/R338E/R403E/ | K82N/N84S/R150Y/R170E/R233E/E240N | 240 |
| E410N | | |
| Y155F/R318Y/R338E/R403E/E410N | Y[155]F/R150Y/R170E/R233E/E240N | 241 |
| K247N/N249S/R318Y/R338E/E410N | K82N/N84S/R150Y/R170E/E240N | 242 |
| Y155F/R318Y/R338E/E410N | Y[155]F/R150Y/R170E/E240N | 243 |
| Y155F/K247N/N249S/R318Y/R338E/ | Y[155]F/K82N/N84S/R150Y/R170E/E240N | 244 |
| E410N | | |
| D104N/K106S/Y155F/K228N/K247N/ | D[104]N/K[106]S/Y[155]F/ | 245 |
| N249S | K63N/K82N/N84S | |
| D104N/K106S/Y155F/K247N/N249S | D[104]N/K[106]S/Y[155]F/ | 246 |
| | K82N/N84S | |
| D104N/K106S/Y155F/K228N | D[104]N/K[106]S/Y[155]F/ | 247 |
| | K63N | |
| Y155F/K228N/K247N/N249S | Y[155]F/K63N/K82N/N84S | 248 |
| D104N/K106S/K228N/K247N/N249S | D[104]N/K[106]S/K63N/K82N/N84S | 184 |
| R318Y/R338E/R403E/E410S | R150Y/R170E/R233E/E240S | 249 |
| R318Y/R338E/R403E/E410N/T412V | R150Y/R170E/R233E/E240N/T242V | 250 |
| R318Y/R338E/R403E/E410N/T412A | R150Y/R170E/R233E/E240N/T242A | 251 |
| R318Y/R338E/R403E/T412A | R150Y/R170E/R233E/T242A | 252 |
| R318Y/R338E/E410S | R150Y/R170E/E240S | 253 |
| R318Y/R338E/T412A | R150Y/R170E/T242A | 254 |
| R318Y/R338E/E410N/T412V | R150Y/R170E/E240N/T242V | 255 |
| D85N/K228N/R318Y/R338E/R403E/ | D[85]N/K63N/R150Y/R170E/R233E/E240N | 256 |
| E410N | | |
| N260S/R318Y/R338E/R403E/E410N | N95S/R150Y/R170E/R233E/E240N | 257 |
| R318Y/R338E/N346D/R403E/E410N | R150Y/R170E/N178D/R233E/E240N | 258 |
| Y155F/N346D | Y[155]F/N178D | 259 |
| Y155F/R318Y/R338E/N346D/R403E/ | Y[155]F/R150Y/R170E/N178D/R233E/E240N | 260 |
| E410N | | |
| Y155F/N260S/N346D | Y[155]F/N95S/N178D | 261 |
| K247N/N249S/N260S | K82N/N84S/N95S | 262 |
| Y155F/N260S | Y[155]F/N95S | 263 |
| K247N/N249S/N260S/R318Y/R338E/ | K82N/N84S/N95S/R150Y/R170E/R233E/E240N | 264 |
| R403E/E410N | | |
| D104N/K106S/N260S/R318Y/R338E/ | D[104]N/K[106]S/N95S/R150Y/R170E/ | 265 |
| R403E/E410N | R233E/E240N | |
| Y155F/N260S/R318Y/R338E/R403E/ | Y[155]F/N95S/R150Y/R170E/R233E/E240N | 266 |
| E410N | | |
| R318Y/R338E/T343R/R403E/E410N | R150Y/R170E/T175R/R233E/E240N | 267 |
| R338E/T343R | R170E/T175R | 268 |
| D104N/K106S/Y155F/N260S | D[104]N/K[106]S/Y[155]F/N95S | 269 |
| Y155F/K247N/N249S/N260S | Y[155]F/K82N/N84S/N95S | 270 |
| D104N/K106S/K247N/N249S/N260S | D[104]N/K[106]S/K82N/N84S/N95S | 271 |
| D104N/K106S/Y155F/K247N/N249S/ | D[104]N/K[106]S/Y[155]F/K82N/ | 272 |
| N260S | N84S/N95S | |
| D104N/K106S/N260S | D[104]N/K[106]S/N95S | 185 |
| T343R/Y345T | T175R/Y177T | 215 |
| R318Y/R338E | R150Y/R170E | 188 |
| Y259F/K265T/Y345T | Y94F/K98T/Y177T | 216 |
| D104N/K106S/Y155F/K247N/N249S/ | D[104]N/K[106]S/Y[155]F/K82N/ | 326 |
| R318Y/R338E/R403E/E410N | N84S/R150Y/R170E/R233E/E240N | |
| D104N/K106S/K228N/K247N/N249S/ | D[104]N/K[106]S/K63N/K82N/N84S/R150Y/ | 327 |
| R318Y/R338E/R403E/E410N | R170E/R233E/E240N | |
| Y155F/K228N/K247N/N249S/R318Y/ | Y[155]F/K63N/K82N/N84S/R150Y/R170E/R233E/ | 328 |
| R338E/R403E/E410N | E240N | |
| Y155F/K247N/N249S/N260S/R318Y/ | Y[155]F/K82N/N84S/N95S/R150Y/R170E/R233E/ | 329 |
| R338E/R403E/E410N | E240N | |
| Y155F/R318Y/R338E/T343R/R403E/ | Y[155]F/R150Y/R170E/T175R/R233E/E240N | 330 |
| E410N | | |
| D104N/K106S/R318Y/R338E/T343R/ | D[104]N/K[106]S/R150Y/R170E/T175R/ | 331 |
| R403E/E410N | R233E/E240N | |
| T343R/N346Y | T175R/N178Y | 332 |
| R318Y/R338E/N346Y/R403E/E410N | R150Y/R170E/N178Y/R233E/E240N | 333 |
| R318Y/R338E/T343R/N346Y/R403E/ | R150Y/R170E/T175R/N178Y/R233E/E240N | 334 |
| E410N | | |
| T343R/N346D | T175R/N178D | 335 |
| R318Y/R338E/T343R/N346D/R403E/ | R150Y/R170E/T175R/N178D/R233E/E240N | 336 |
| E410N | | |
| R318Y/R338E/Y345A/R403E/E410N | R150Y/R170E/Y177A/R233E/E240N | 337 |
| R318Y/R338E/Y345A/N346D/R403E/ | R150Y/R170E/Y177A/N178D/R233E/E240N | 338 |
| E410N | | |
| Y155F/K247N/N249S/R318Y/R338E/ | Y[155]F/K82N/N84S/R150Y/R170E/R233E | 339 |
| R403E | | |
| K247N/N249S/R318Y/R338E/R403E | K82N/N84S/R150Y/R170E/R233E | 340 |
| Y155F/K247N/N249S/R318Y/R403E/ | Y[155]F/K82N/N84S/R150Y/R233E/E240N | 341 |
| E410N | | |
| K247N/N249S/R318Y/R403E/E410N | K82N/N84S/R150Y/R233E/E240N | 342 |
| Y155F/K247N/N249S/R338E/R403E/ | Y[155]F/K82N/N84S/R170E/R233E/E240N | 343 |
| E410N | | |
| K247N/N249S/R338E/R403E/E410N | K82N/N84S/R170E/R233E/E240N | 344 |
| R318Y/R338E/T343R/R403E | R150Y/R170E/T175R/R233E | 345 |
| Y155F/R318Y/R338E/T343R/R403E | Y[155]F/R150Y/R170E/T175R/R233E | 346 |
| R318Y/R338E/T343R/E410N | R150Y/R170E/T175R/E240N | 347 |
| Y155F/R318Y/R338E/T343R/E410N | Y[155]F/R150Y/R170E/T175R/E240N | 348 |
| R318Y/T343R/R403E/E410N | R150Y/T175R/R233E/E240N | 349 |
| Y155F/R318Y/T343R/R403E/E410N | Y[155]F/R150Y/T175R/R233E/E240N | 350 |
| R338E/T343R/R403E/E410N | R170E/T175R/R233E/E240N | 351 |
| Y155F/R338E/T343R/R403E/E410N | Y[155]F/R170E/T175R/R233E/E240N | 352 |
| Y155F/K247N/N249S/R318Y/R338E/ | Y[155]F/K82N/N84S/R150Y/R170E/T175R/ | 353 |
| T343R/R403E/E410N | R233E/E240N | |
| K247N/N249S/R318Y/R338E/T343R/ | K82N/N84S/R150Y/R170E/T175R/R233E/E240N | 354 |
| R403E/E410N | | |
| K228N/I251S/R318Y/R338E/R403E/ | K63N/I86S/R150Y/R170E/R233E/E240N | 355 |
| E410N | | |
| Y155F/K228N/I251S/R318Y/R338E/ | Y[155]F/K63N/I86S/R150Y/R170E/R233E/ | 356 |
| R403E/E410N | E240N | |
| N260S/R318Y/R338E/T343R/R403E/ | N95S/R150Y/R170E/T175R/R233E/E240N | 357 |
| E410N | | |
| Y155F/N260S/R318Y/R338E/T343R/ | Y[155]F/N95S/R150Y/R170E/T175R/R233E/ | 358 |
| R403E/E410N | E240N | |
| K228N/K247N/N249S/R318Y/R338E/ | K63N/K82N/N84S/R150Y/R170E/T175R/R233E/E240N | 359 |
| T343R/R403E/E410N | | |
| Y155F/K228N/K247N/N249S/R318Y/ | Y[155]F/K63N/K82N/N84S/R150Y/R170E/ | 360 |
| R338E/T343R/R403E/E410N | T175R/R233E/E240N | |
| Y155F/R338E/T343R/R403E | Y[155]F/R170E/T175R/R233E | 361 |
| R338E/T343R/R403E | R170E/T175R/R233E | 362 |
| Y155F/R338E/T343R/R403E/E410S | Y[155]F/R170E/T175R/R233E/E240S | 363 |
| Y155F/N260S/R338E/T343R/R403E | Y[155]F/N95S/R170E/T175R/R233E | 364 |
| Y155F/I251S/R338E/T343R/R403E | Y[155]F/I86S/R170E/T175R/R233E | 365 |
| R318Y/R338E/T343R/R403E/E410S | R150Y/R170E/T175R/R233E/E240S | 366 |
| Y155F/K247N/N249S/T343R/R403E | Y[155]F/K82N/N84S/T175R/R233E | 367 |
| Y155F/K247N/N249S/R318Y/R338E/ | Y[155]F/K82N/N84S/R150Y/R170E/T175R/ | 368 |
| T343R/R403E | R233E | |
| K247N/N249S/R318Y/R338E/T343R/ | K82N/N84S/R150Y/R170E/T175R/R233E | 369 |
| R403E | | |
| Y155F/K247N/N249S/R338E/T343R/ | Y[155]F/K82N/N84S/R170E/T175R/R233E/ | 370 |
| R403E/E410N | E240N | |
| K247N/N249S/R338E/T343R/R403E/ | K82N/N84S/R170E/T175R/R233E/E240N | 371 |
| E410N | | |
| Y155F/K247N/N249S/R318Y/R338E | Y[155]F/K82N/N84S/R150Y/R170E | 372 |
| Y155F/K247N/N249S/R318Y/T343R | Y[155]F/K82N/N84S/R150Y/T175R | 373 |
| Y155F/K247N/N249S/R318Y/R403E | Y[155]F/K82N/N84S/R150Y/R233E | 374 |
| Y155F/K247N/N249S/R318Y/E410N | Y[155]F/K82N/N84S/R150Y/E240N | 375 |
| Y155F/K247N/N249S/R338E/R403E | Y[155]F/K82N/N84S/R170E/R233E | 376 |
| Y155F/K247N/N249S/R338E/T343R | Y[155]F/K82N/N84S/R170E/T175R | 377 |
| Y155F/K247N/N249S/R318Y/R338E/ | Y[155]F/K82N/N84S/R150Y/R170E/T175R/ | 378 |
| T343R/E410N | E240N | |
| K247N/N249S/R318Y/R338E/T343R/ | K82N/N84S/R150Y/R170E/T175R/E240N | 379 |
| E410N | | |
| Y155F/K247N/N249S/R318Y/T343R/ | Y[155]F/K82N/N84S/R150Y/T175R/R233E/ | 380 |
| R403E/E410N | E240N | |
| K247N/N249S/R318Y/T343R/R403E/ | K82N/N84S/R150Y/T175R/R233E/E240N | 381 |
| E410N | | |
| Y155F/K247N/N249S/R338E/E410N | Y[155]F/K82N/N84S/R170E/E240N | 382 |
| Y155F/K247N/N249S/R318Y/T343R/ | Y[155]F/K82N/N84S/R150Y/T175R/R233E | 383 |
| R403E | | |
| K247N/N249S/R318Y/T343R/R403E | K82N/N84S/R150Y/T175R/R233E | 384 |
| Y155F/K247N/N249S/R318Y/T343R/ | Y[155]F/K82N/N84S/R150Y/T175R/E240N | 385 |
| E410N | | |
| K247N/N249S/R318Y/T343R/E410N | K82N/N84S/R150Y/T175R/E240N | 386 |
| Y155F/K247N/N249S/R338E/T343R/ | Y[155]F/K82N/N84S/R170E/T175R/R233E | 387 |
| R403E | | |
| K247N/N249S/R338E/T343R/R403E | K82N/N84S/R170E/T175R/R233E | 388 |
| Y155F/K247N/N249S/R338E/T343R/ | Y[155]F/K82N/N84S/R170E/T175R/E240N | 389 |
| E410N | | |
| K247N/N249S/R338E/T343R/E410N | K82N/N84S/R170E/T175R/E240N | 390 |
| Y155F/K247N/N249S/T343R/R403E/ | Y[155]F/K82N/N84S/T175R/R233E/E240N | 391 |
| E410N | | |
| K247N/N249S/T343R/R403E/E410N | K82N/N84S/T175R/R233E/E240N | 392 |
| Y155F/R318Y/R338E/T343R | Y[155]F/R150Y/R170E/T175R | 393 |
| R318Y/R338E/T343R | R150Y/R170E/T175R | 394 |
| Y155F/R318Y/T343R/R403E | Y[155]F/R150Y/T175R/R233E | 395 |
| Y155F/T343R/R403E/E410N | Y[155]F/T175R/R233E/E240N | 396 |
| Y155F/K247N/N249S/R318Y/R338E/ | Y[155]F/K82N/N84S/R150Y/R170E/T175R | 397 |
| T343R | | |
| K247N/N249S/R318Y/R338E/T343R | K82N/N84S/R150Y/R170E/T175R | 398 |
| Y155F/K247N/N249S/T343R/E410N | Y[155]F/K82N/N84S/T175R/E240N | 399 |
| Y155F/K247N/N249S/R403E/E410N | Y[155]F/K82N/N84S/R233E/E240N | 400 |
| Y155F/R338E/T343R/E410N | Y[155]F/R170E/T175R/E240N | 401 |
| R338E/T343R/E410N | R170E/T175R/E240N | 402 |
| Y155F/R318Y/T343R/E410N | Y[155]F/R150Y/T175R/E240N | 403 |
| R318Y/T343R/E410N | R150Y/T175R/E240N | 404 |
| K228N/R318Y/R338E/T343R/R403E/ | K63N/R150Y/R170E/T175R/R233E/E240N | 405 |
| E410N | | |
| K228N/K247N/N249S/R318Y/R338E/ | K63N/K82N/N84S/R150Y/R170E/T175R/R233E | 406 |
| T343R/R403E | | |
| K228N/K247N/N249S/R318Y/R338E/ | K63N/K82N/N84S/R150Y/R170E/T175R/E240N | 407 |
| T343R/E410N | | |
| K228N/K247N/N249S/R318Y/T343R/ | K63N/K82N/N84S/R150Y/T175R/R233E/E240N | 408 |
| R403E/E410N | | |
| Y155F/R338E/R403E/E410N | Y[155]F/R170E/R233E/E240N | 409 |
| Y155F/R318Y/R338E/R403E | Y[155]F/R150Y/R170E/R233E | 410 |
| Y155F/R318Y/R403E/E410N | Y[155]F/R150Y/R233E/E240N | 411 |

[0453] 3. Conjugates and Fusion Proteins

[0454] The modified FIX polypeptides provided herein can be conjugated or fused to another polypeptide or other moiety, such as a polymer. In some instances, the conjugation or fusion is effected to increase serum half-life. Exemplary polypeptides to which the modified FIX polypeptides provided herein can be fused include, but are not limited to, serum albumin, Fc, FcRn, and transferrin (see, e.g., Sheffield, W. P. et al., (2004) Br. J. Haematol. 126(4):565-73; U.S. Patent Publication No. 2005/0147618; and International Application Publication Nos. WO 2007/112005 and WO 2004/101740).

[0455] The modified FIX polypeptides provided herein can be conjugated to a polymer, such as dextran, a polyethylene glycol (PEG) or sialyl moiety, or other such polymers, such as natural or sugar polymers. In one example, the polypeptides are conjugated to dextrans, such as described elsewhere (Zambaux et al., (1998) J. Protein Chem. 17(3):279-84). Various methods of modifying polypeptides by covalently attaching (conjugating) a PEG or PEG derivative (i.e., “PEGylation”) are known in the art (see e.g., U.S. 2006/0104968, U.S. Pat. Nos. 5,672,662, 6,737,505 and U.S. 2004/0235734). Techniques for PEGylation include, but are not limited to, specialized linkers and coupling chemistries (see, e.g., Harris, (2002) Adv. Drug Deliv. Rev. 54:459-476), attachment of multiple PEG moieties to a single conjugation site (such as via use of branched PEGs; see, e.g., Veronese et al., (2002) Bioorg. Med. Chem. Lett. 12:177-180), site-specific PEGylation and/or mono-PEGylation (see, e.g., Chapman et al., (1999) Nature Biotech. 17:780-783), site-directed enzymatic PEGylation (see, e.g., Sato, (2002) Adv. Drug Deliv. Rev., 54:487-504, 2002), and glycoPEGylation (see, e.g., U.S. Patent Publication Nos. 2008/0050772, 2008/0146494, 2008/0050772, 2008/0187955, and 2008/0206808). Methods and techniques described in the art can produce proteins having 1, 2, 3, 4, 5, 6, 7, 8, 9, 10 or more PEG or PEG derivatives attached to a single protein molecule (see, e.g., U.S. 2006/0104968). Thus, the modified FIX polypeptide provided herein can be PEGylated, including glycoPEGylated, using any method known in the art, such as any described in U.S. Pat. Nos. 5,969,040, 5,621,039, 6,423,826; U.S. Patent Publication Nos. 2003/0211094, 2007/0254840, 2008/0188414, 2008/000422, 2008/0050772, 2008/0146494, 2008/0050772, 2008/0187955 and 2008/0206808; and International Application Publication Nos. WO 2007/112005, WO 2007/135182, WO 2008/082613, WO 2008/119815, and WO 2008/119815.

[0456] In some instances, the modified FIX polypeptides include amino acid replacements to facilitate conjugation to another moiety. For example, cysteine residues can be incorporated into the FIX polypeptide to facilitate conjugation to polymers. Exemplary amino acid replacement modifications for this purpose include, but are not limited to, D47C, Q50C, S53C, L57C, I66C, N67C, S68C, E70C, W72C, P74C, K80C, L84C, V86C, N89C, I90C, K91C, R94C, K100C, N101C, S102C, A103C, D104C, N105C, K106C, V108C, E114C, R116C, E119C, N120C, Q121C, S123C, E125C, P129C, S138C, T140C, S141C, K142C, A146C, E147C, E162C, T163C, I164C, L165C, D166C, N167C, I168C, T169C, Q170C, S171C, T172C, Q173C, S174C, F175C, N176C, D177C, F178C, T179C, R180C, E185C, D186C, K188C, P189C, K201C, V202C, D203C, E224C, T225C, K228C, E239C, E240C, T241C, H243C, K247C, N249C, R252C, H257C, N260C, A261C, A262C, I263C, K265C, E277C, F314C, R318C, L321C, K341C, E372C, E374C, M391C, K392C, N406C, K413C, and T415C (corresponding to a mature FIX polypeptide set forth in SEQ ID NO:3).

### F. PRODUCTION OF FIX POLYPEPTIDES

[0457] FIX polypeptides, including modified FIX polypeptides, or domains thereof, of FIX can be obtained by methods well known in the art for protein purification and recombinant protein expression. Any method known to those of skill in the art for identification of nucleic acids that encode desired genes can be used. Any method available in the art can be used to obtain a full length (i.e., encompassing the entire coding region) cDNA or genomic DNA clone encoding a FIX polypeptide or other vitamin-K polypeptide, such as from a cell or tissue source, such as for example from liver. Modified FIX polypeptides can be engineered as described herein, such as by site-directed mutagenesis.

[0458] FIX can be cloned or isolated using any available methods known in the art for cloning and isolating nucleic acid molecules. Such methods include PCR amplification of nucleic acids and screening of libraries, including nucleic acid hybridization screening, antibody-based screening and activity-based screening.

[0459] Methods for amplification of nucleic acids can be used to isolate nucleic acid molecules encoding a FIX polypeptide, including for example, polymerase chain reaction (PCR) methods. A nucleic acid containing material can be used as a starting material from which a FIX-encoding nucleic acid molecule can be isolated. For example, DNA and mRNA preparations, cell extracts, tissue extracts (e.g., from liver), fluid samples (e.g., blood, serum, saliva), samples from healthy and/or diseased subjects can be used in amplification methods. Nucleic acid libraries also can be used as a source of starting material. Primers can be designed to amplify a FIX-encoding molecule. For example, primers can be designed based on expressed sequences from which a FIX is generated. Primers can be designed based on back-translation of a FIX amino acid sequence. Nucleic acid molecules generated by amplification can be sequenced and confirmed to encode a FIX polypeptide.

[0460] Additional nucleotide sequences can be joined to a FIX-encoding nucleic acid molecule, including linker sequences containing restriction endonuclease sites for the purpose of cloning the synthetic gene into a vector, for example, a protein expression vector or a vector designed for the amplification of the core protein coding DNA sequences. Furthermore, additional nucleotide sequences specifying functional DNA elements can be operatively linked to a FIX-encoding nucleic acid molecule. Examples of such sequences include, but are not limited to, promoter sequences designed to facilitate intracellular protein expression, and secretion sequences designed to facilitate protein secretion. Additional nucleotide sequences such as sequences specifying protein binding regions also can be linked to FIX-encoding nucleic acid molecules. Such regions include, but are not limited to, sequences to facilitate uptake of FIX into specific target cells, or otherwise enhance the pharmacokinetics of the synthetic gene.

[0461] The identified and isolated nucleic acids can then be inserted into an appropriate cloning vector. A large number of vector-host systems known in the art can be used. Possible vectors include, but are not limited to, plasmids or modified viruses, but the vector system must be compatible with the host cell used. Such vectors include, but are not limited to, bacteriophages such as lambda derivatives, or plasmids such as pBR322 or pUC plasmid derivatives or the Bluescript vector (Stratagene, La Jolla, Calif.). The insertion into a cloning vector can, for example, be accomplished by ligating the DNA fragment into a cloning vector which has complementary cohesive termini. Insertion can be effected using TOPO cloning vectors (Invitrogen, Carlsbad, Calif.). If the complementary restriction sites used to fragment the DNA are not present in the cloning vector, the ends of the DNA molecules can be enzymatically modified. Alternatively, any site desired can be produced by ligating nucleotide sequences (linkers) onto the DNA termini; these ligated linkers can contain specific chemically synthesized oligonucleotides encoding restriction endonuclease recognition sequences. In an alternative method, the cleaved vector and FIX protein gene can be modified by homopolymeric tailing. Recombinant molecules can be introduced into host cells via, for example, transformation, transfection, infection, electroporation and sonoporation, so that many copies of the gene sequence are generated.

[0462] In specific embodiments, transformation of host cells with recombinant DNA molecules that incorporate the isolated FIX protein gene, cDNA, or synthesized DNA sequence enables generation of multiple copies of the gene. Thus, the gene can be obtained in large quantities by growing transformants, isolating the recombinant DNA molecules from the transformants and, when necessary, retrieving the inserted gene from the isolated recombinant DNA. Details of cloning and expression of the modified FIX polypeptides are described in U.S. Pat. Nos. 9,328,339 and 8,778,870.

[0463] Nucleic acid molecules encoding FIX or modified FIX polypeptides are provided herein. Nucleic acid molecules include allelic variants or splice variants of any encoded FIX polypeptide. Exemplary of nucleic acid molecules provided herein are any that encode a modified FIX polypeptide provided herein, such as any encoding a polypeptide set forth in any of SEQ ID NOs:75-272, and those including introns as described herein and exemplified in the Sequence Listing.

[0464] In some embodiments, nucleic acid molecules provided herein are optimized for expression in a mammal, such as a human or a mouse. It is found that mouse optimized codons are at least about 90% identical to human optimized codons. The nucleic acid molecules provided herein have at least 50, 60, 65, 70, 75, 80, 85, 90, 91, 92, 93, 94, 95, or 99% sequence identity or hybridize under conditions of medium or high stringency along at least 70% of the full-length of any nucleic acid encoding a FIX polypeptide provided herein. For example, the nucleic acid molecules provided herein have at least or at least about 50, 60, 65, 70, 75, 80, 85, 90, 91, 92, 93, 94, 95, or 99% sequence identity to the nucleic acid sequence set forth in SEQ ID NO:1. In another embodiment, a nucleic acid molecule can include those with degenerate codon sequences, including the optimized sequences encoding any of the FIX polypeptides provided herein.

### G. ASSESSING MODIFIED FIX POLYPEPTIDE ACTIVITIES

[0465] The activities and properties of FIX polypeptides can be assessed in vitro and/or in vivo. Assays for such assessment are known to those of skill in the art and are known to correlate tested activities and results to therapeutic and in vivo activities. In one example, FIX variants can be assessed in comparison to unmodified and/or wild-type FIX. Such assays can be performed in the presence or absence of FVIIIa, phospholipids and/or calcium. In vitro assays include any laboratory assay known to one of skill in the art, such as for example, cell-based assays including coagulation assays, binding assays, protein assays, and molecular biology assays. In vivo assays include FIX assays in animal models as well as administration to humans. In some cases, activity of FIX polypeptides in vivo can be determined by assessing blood, serum, or other bodily fluid for assay determinants. FIX variants, such as those provided herein, also can be tested in vivo to assess an activity or property, such as therapeutic effect.

[0466] Typically, assays described herein are with respect to the two-chain activated form of FIX, i.e., FIXa. FIX polypeptides that have been activated via proteolytic cleavage after R145 and R180 can be prepared in vitro. The FIX polypeptides can be first prepared by any of the methods of production described herein, including, but not limited to, production in mammalian cells followed by purification. Cleavage of the FIX polypeptides into the active protease form of FIX can be accomplished by incubation with activated Factor XI (FXIa). The activated polypeptides can be used in any of the assays to measure FIX activities described herein. Such assays also can be performed with the single chain zymogen form. For example, a single chain zymogen FIX polypeptide can provide a negative control since such a form typically does not exhibit the proteolytic or catalytic activity required for the coagulant activity of FIX. In addition, such assays also can be performed in the presence of cofactors, such as FVIIIa, and other molecules, such as phospholipids and/or calcium, which in can augment the activity of FIX.

[0467] 1. In Vitro Assays

[0468] Exemplary in vitro assays include assays to assess polypeptide modification and activity. Modifications can be assessed using in vitro assays that assess glycosylation, γ-carboxylation and other post-translational modifications, protein assays and conformational assays known in the art. Assays for activity include, but are not limited to, measurement of FIX interaction with other coagulation factors, such as FVIIIa and Factor X, proteolytic assays to determine the proteolytic activity of FIX polypeptides, assays to determine the binding and/or affinity of FIX polypeptides for phosphatidylserines and other phospholipids, and cell based assays to determine the effect of FIX polypeptides on coagulation.

[0469] Concentrations of modified FIX polypeptides can be assessed by methods well-known in the art, including but not limited to, enzyme-linked immunosorbent assays (ELISA), SDS-PAGE; Bradford, Lowry, BCA methods; UV absorbance, and other quantifiable protein labeling methods, such as, but not limited to, immunological, radioactive and fluorescent methods and related methods. Assessment of cleavage products of proteolysis reactions, including cleavage of FIX polypeptides or products produced by FIX protease activity, can be performed using methods including, but not limited to, chromogenic substrate cleavage, HPLC, SDS-PAGE analysis, ELISA, Western blotting, immunohistochemistry, immunoprecipitation, NH₂-terminal sequencing, fluorescence, and protein labeling.

[0470] Structural properties of modified FIX polypeptides can also be assessed. For example, X-ray crystallography, nuclear magnetic resonance (NMR), and cryoelectron microscopy (cryo-EM) of modified FIX polypeptides can be performed to assess three-dimensional structure of the FIX polypeptides and/or other properties of FIX polypeptides, such as Ca′ or cofactor binding.

[0471] Additionally, the presence and extent of FIX degradation can be measured by standard techniques such as sodium dodecyl sulfate polyacrylamide gel electrophoresis (SDS-PAGE), and Western blotting of electrophoresed FIX-containing samples. FIX polypeptides that have been exposed to proteases also can be subjected to N-terminal sequencing to determine location or changes in cleavage sites of the modified FIX polypeptides.

[0472] a. Glycosylation

[0473] FIX polypeptides can be assessed for the presence of glycosylation using methods well known in the art. Glycosylation of a polypeptide can been characterized from its enzymatically or chemically released carbohydrate pool, using a wide variety of methods, such as high pH anion exchange chromatography (Townsend et al., (1991) Glycobiology 1:139-147), or fluorophore-assisted carbohydrate electrophoresis (FACE) (Kumar et al., (1996) Biotechnol. Appl. Biochem. 24:207-214.), sequential exoglycosidase digestions (Watzlawick et al., (1992) Biochemistry 31:12198-12203; Tyagaraj an et al., (1996) Glycobiology, 6:83-93), mass spectrometry (Gillece-Castro et al., (1990) Meth. Enzymol. 193: 689-712; Duffin et al., (1992) Anal. Chem. 64:1440-1448; Papac et al., (1997) in Techniques in Glycobiology (Townsend R. R. and Hotchkiss A. T. eds.) Marcel Decker, Inc., New York, pp. 33-52; Fu et al., (1994) Carbohydr. Res. 261:173-186), and NMR (Fu et al., (1994) Carbohydr. Res. 261:173-186).

[0474] For example, chemical release can be effected by hydrazinolysis, which releases N- and O-linked glycans from glycoproteins by incubation with anhydrous hydrazine. Enzymatic release can be effected by the endoglycosidases peptide N-glycosidase F (PNGase F), which removes unaltered most of the common N-linked carbohydrates from the polypeptide while hydrolyzing the originally glycosylated Asn residue to Asp. Hydrazinolysis or endoglycosidase treatment of FIX polypeptides generates a reducing terminus that can be tagged with a fluorophore or chromophore label. Labeled FIX polypeptides can be analyzed by fluorophore-assisted carbohydrate electrophoresis (FACE). The fluorescent tag for glycans also can be used for monosaccharide analysis, profiling or fingerprinting of complex glycosylation patterns by HPLC. Exemplary HPLC methods include hydrophilic interaction chromatography, electronic interaction, ion-exchange, hydrophobic interaction, and size-exclusion chromatography. Exemplary glycan probes include, but are not limited to, 3-(acetylamino)-6-aminoacridine (AA-Ac) and 2-aminobenzoic acid (2-AA). Carbohydrate moieties can also be detected through use of specific antibodies that recognize the glycosylated FIX polypeptide.

[0475] In one method, mass spectrometry is used to assess site-specific carbohydrate heterogeneity. This can involve matrix-assisted laser desorption ionization mass spectrometry of collected HPLC-fractions (Sutton et al., (1994) Anal. Biochem. 218:34-46; Ploug et al., (1998) J. Biol. Chem. 273:13933-13943), or reversed phase HPLC directly coupled with electrospray ionization mass spectrometry (LC/ESIMS) (see, e.g., Huddleston et al., (1993) Anal. Chem. 65:877-884; Medzihradsky et al., (2008) Methods Mol. Biol. 446:293-316). In one example, glycosylation at potential N-glycosylation sites, such as an asparagine residue within an Asn-X-Ser/Thr/Cys motif, is assessed by LC/ESIMS. The potential N-glycosylation sites in a FIX polypeptide can be identified, and a proteolytic enzyme can be selected that would separate these sites on individual peptides. The digestion mixture is then analyzed by LC/ESIMS, a method that generates diagnostic carbohydrate ions by collisional activation (33). These diagnostic carbohydrate ions include, for example, characteristic non-reducing end oxonium ions at m/z 204, 274 and 292, 366, and 657, which indicate the presence of N-acetylhexosamine, neuraminic (sialic) acid, hexosyl-N-acetylhexosamine, and sialyl-hexosyl-Nacetylhexosamine, respectively. In addition to identifying the presence of these ions by selective ion monitoring (SIM), the LC/ESIMS method also analyzes the peptide to assess the molecular weight, which can be used to indicate which peptide, and, therefore, which potential N-glycosylation site, contains the carbohydrate.

[0476] b. Other Post-Translational Modifications

[0477] FIX polypeptides can be assessed for the presence of post-translational modifications other than glycosylation. Such assays are known in the art and include assays to measure hydroxylation, sulfation, phosphorylation and carboxylation. An exemplary assay to measure β-hydroxylation comprises reverse phase HPLC analysis of FIX polypeptides that have been subjected to alkaline hydrolysis (Przysiecki et al. (1987) Proc. Natl. Acad. Sci. U.S.A. 84:7856-7860). Carboxylation and γ-carboxylation of FIX polypeptides can be assessed using mass spectrometry with matrix-assisted laser desorption ionization time-of-flight (MALDI-TOF) analysis, as described for other vitamin K-dependent polypeptides (see, e.g., Harvey et al. (2003) J. Biol. Chem. 278:8363-8369; Maun et al. (2005) Prot. Sci. 14:1171-1180). The interaction of a FIX polypeptide containing the propeptide (pro-FIX) with the carboxylase responsible for post-translational γ-carboxylate modification also can be assessed. The dissociation constant (K_{d}) following incubation of carboxylase with fluorescein-labeled pro-FIX polypeptides can be measured by determining the amount of bound carboxylase by anisotropy (Lin et al. (2004) J. Biol. Chem. 279:6560-6566). Other exemplary assays to measure carboxylation include reverse phase HPLC analysis of FIX polypeptides that have been subjected to alkaline hydrolysis (Przysiecki et al. (1987) Proc. Natl. Acad. Sci. U.S.A. 84:7856-7860).

[0478] Exemplary assays to measure phosphorylation include use of phosphospecific antibodies to phosphoserine and/or -tyrosine amino acid residues or to a serine-phosphorylated FIX polypeptide. ³²P metabolic labeling of cells that produce the FIX polypeptide also can be used to assess phosphorylation, wherein the labeled FIX polypeptide can be purified and analyzed for incorporation of radioactive phosphate. An exemplary assay for tyrosine sulfation includes ³⁵S labeling of cells that produce the FIX polypeptide. In such method, cells are incubated with either ³⁵S—S₂SO₄ or ³⁵S-methionine and incorporation of the ³⁵S is determined by normalization to the ³⁵S-methionine sample.

[0479] c. Proteolytic Activity

[0480] Modified FIX polypeptides can be tested for proteolytic activity towards both synthetic substrates and its natural substrate, Factor X. Activated forms of the modified FIX polypeptides (FIXa) typically are used in in vitro assays. Assays using a synthetic substrate, such as a CH₃SO₂-LGR-pNA peptide, can be employed to measure enzymatic cleavage activity of the FIXa polypeptides. Hydrolysis of CH₃SO₂-LGR-pNA in the presence of FIXa can be measured by assessing the production of p-nitroanaline (pNA) from the cleavage reaction sample. The amount of pNA in the sample is proportional to the absorbance of the sample at 405 nm and thus indicates the extent of proteolytic activity in the FIXa sample. Additional exemplary fluorogenic substrates that can be used to assess FIXa cleavage activity include, but are not limited to, Mes-D-CHD-Gly-Arg-AMC (Pefafluor FIXa10148) and H-D-Leu-PHG-Arg-AMC (Pefafluor FIXa3688), wherein cleavage is assessed by release of AMC, and the fluorogenic ester substrate, 4-methylumbelliferyl p′-guanidinobenzoate (MUGB), where cleavage is assessed by the release of 4-methylumbelliferone fluorophore (4-MU) (see, e.g., Example 3). Molecules that enhance FIXa catalytic activity, such as ethylene glycol, can be employed in such assays (Sturzebecher et al. (1997) FEBS Lett. (412):295-300).

[0481] Proteolytic activity of FIXa also can be assessed by measuring the conversion of factor X (FX) into activated Factor X (FXa), such as described in Example 4, below. FIXa polypeptides, including the modified FIX polypeptides provided herein, can be incubated with FX polypeptides in the presence of FVIIIa, phospholipids vesicles (phosphatidylserine and/or phosphatidylcholine) and Ca²⁺, and cleavage of FX to produce FXa can be assayed using a fluorogenic substrate, such as Spectrafluor Fxa (CH₃SO₂-D-CHA-Gly-Arg-AMC), or a chromogenic substrate, such as S2222 or S2765 (Chromogenics AB, Molndal, Sweden), which are specifically cleaved by FXa.

[0482] d. Coagulation Activity

[0483] FIX polypeptides can be tested for coagulation activity by using assays well known in the art. For example, some of the assays include, but are not limited to, a two stage clotting assay (Liebman et al., (1985) Proc. Natl. Acad. Sci. U.S.A. 82:3879-3883); the prothrombin time assay (PT, which can measure TF-dependent activity of FIXa in the extrinsic pathway); assays which are modifications of the PT test; the activated partial thromboplastin time (aPTT, which can measure TF-independent activity of FIXa); activated clotting time (ACT); recalcified activated clotting time; the Lee-White Clotting time; or thromboelastography (TEG) (Pusateri et al. (2005) Critical Care 9:S15-S24). For example, coagulation activity of a modified FIX polypeptide can be determined by a PT-based assay where FIX is diluted in FIX-deficient plasma, and mixed with prothrombin time reagent (recombinant TF with phospholipids and calcium), such as that available as Innovin™ from Dade Behring. Clot formation is detected optically and time to clot is determined and compared against FIX-deficient plasma alone. In vivo coagulation assays in animal models, such as those described below, also can be performed to assess the coagulation activity of FIX polypeptides.

[0484] e. Binding to and/or Inhibition by Other Proteins and Molecules

[0485] Inhibition assays can be used to measure resistance of modified FIX polypeptides to FIX inhibitors, such as, for example, antithrombin III (AT-III), heparin, AT-III/heparin complex, p-aminobenzamidine, serine protease inhibitors, and FIX-specific antibodies. Assessment of inhibition to other inhibitors also can be tested and include, but are not limited to, other serine protease inhibitors. Inhibition can be assessed by incubation of the inhibitor with FIX polypeptides that have been pre-incubated with and/or without FVIIIa. The activity of FIX can then be measured using any one or more of the activity or coagulation assays described above, and inhibition by the inhibitor can be assessed by comparing the activity of FIX polypeptides incubated with the inhibitor, with the activity of FIX polypeptides that were not incubated with the inhibitor. For example, the inhibition of modified FIX polypeptides by AT-III/heparin can be assessed as described in Example 5, below. Inhibition of wild-type FIXa or FIXa variants by the AT-III/heparin complex is assessed by incubating AT-III/heparin with FIXa and the measuring the catalytic activity of FIXa towards a small molecule substrate, Mesyl-D-CHG-Gly-Arg-AMC (Pefafluor FIXa; Pentapharm). Such assays can be performed in the presence or absence of FVIIIa.

[0486] FIX polypeptides also can be tested for binding to other coagulation factors and inhibitors. For example, FIX direct and indirect interactions with cofactors, such as FVIIIa, substrates, such as FX and FIX, and inhibitors, such as antithrombin III and heparin, can be assessed using any binding assay known in the art, including, but not limited to, immunoprecipitation, column purification, non-reducing SDS-PAGE, BIAcore® assays, surface plasmon resonance (SPR), fluorescence resonance energy transfer (FRET), fluorescence polarization (FP), isothermal titration calorimetry (ITC), circular dichroism (CD), protein fragment complementation assays (PCA), Nuclear Magnetic Resonance (NMR) spectroscopy, light scattering, sedimentation equilibrium, small-zone gel filtration chromatography, gel retardation, Far-western blotting, fluorescence polarization, hydroxyl-radical protein foot printing, phage display, and various two-hybrid systems.

[0487] f. Phospholipid Affinity

[0488] Modified FIX polypeptide binding and/or affinity for phosphatidylserine (PS) and other phospholipids can be determined using assays well known in the art. Highly pure phospholipids (for example, known concentrations of bovine PS and egg phosphatidylcholine (PC), which are commercially available, such as from Sigma, in organic solvent can be used to prepare small unilamellar phospholipid vesicles. FIX polypeptide binding to these PS/PC vesicles can be determined by relative light scattering at 90° to the incident light. The intensity of the light scatter with PC/PS alone and with PC/PS/FIX is measured to determine the dissociation constant (Harvey et al., (2003) J. Biol. Chem. 278:8363-8369). Surface plasma resonance, such as on a BIAcore biosensor instrument, also can be used to measure the affinity of FIX polypeptides for phospholipid membranes (Sun et al., (2003) Blood 101:2277-2284).

[0489] 2. Non-Human Animal Models

[0490] Non-human animal models can be used to assess activity and stability of modified FIX polypeptides. For example, non-human animals can be used as models for a disease or condition. Non-human animals can be injected with disease and/or phenotype-inducing substances prior to administration of FIX variants to monitor the effects on disease progression. Genetic models also are useful. Animals, such as mice, can be generated which mimic a disease or condition by the overexpression, under-expression, or knock-out of one or more genes. Such animals can be generated by transgenic animal production techniques well-known in the art or using naturally-occurring or induced mutant strains. Examples of useful non-human animal models of diseases associated with FIX include, but are not limited to, models of bleeding disorders, in particular hemophilia. These non-human animal models can be used to monitor activity of FIX variants compared to a wild type FIX polypeptide.

[0491] Animal models also can be used to monitor stability, half-life, clearance, and other pharmacokinetic and pharmacodynamic properties of modified FIX polypeptides. Such assays are useful for comparing modified FIX polypeptides and for calculating doses and dose regimens for further non-human animal and human trials. For example, a modified FIX polypeptide can be injected into the tail vein of mice. Blood samples are then taken at time-points after injection (such as minutes, hours and days afterwards) and then the pharmacokinetic and pharmacodynamic properties of the modified FIX polypeptides assessed, such as by monitoring the serum or plasma at specific time-points for FIXa activity and protein concentration by ELISA or radioimmunoassay (see, e.g., Example 6). Blood samples also can be tested for coagulation activity in methods, such as the aPTT assay (see, e.g., Example 6).

[0492] Modified FIX polypeptides can be tested for therapeutic effectiveness using animal models for hemophilia. In one non-limiting example, an animal model such as a mouse can be used. Mouse models of hemophilia are available in the art and include FIX deficient mice (such as those utilized in Example 7, below) and mice expressing mutant FIX polypeptides, and can be employed to test modified FIX polypeptides (Wang et al., (1997) Proc. Natl. Acad. Sci. U.S.A. 94:11563-11566; Lin et al., (1997) Blood 90:3962-3966; Kundu et al., (1998) Blood 92: 168-174; Sabatino et al., (2004) Blood 104(9):2767-2774; and Jin et al., (2004) Blood 104:1733-1739; see also Example 7).

[0493] Other models of FIX deficiencies include hemophilic dogs that express defective FIX or that have been hepatectomized (Evans et al., (1989) Proc. Natl. Acad. Sci. U.S.A. 86:10095; Mauser et al., (1996) Blood 88:3451; and Kay et al., (1994) Proc. Natl. Acad. Sci. U.S.A. 91:2353-2357).

[0494] 3. Clinical Assays

[0495] Many assays are available to assess activity of FIX for clinical use. Such assays can include assessment of coagulation, protein stability, and half-life in vivo and phenotypic assays. Phenotypic assays and assays to assess the therapeutic effect of FIX treatment include assessment of blood levels of FIX (such as measurement of serum FIX prior to administration and time-points following administrations including, after the first administration, immediately after last administration, and time-points in between, correcting for the body mass index (BMI)), phenotypic response to FIX treatment including amelioration of symptoms over time compared to subjects treated with an unmodified and/or wild type FIX or placebo. Examples of clinical assays to assess FIX activity can be found, for example, in Franchini et al., (2005) J. Thromb. Haemost. 93(6):1027-1035; Shapiro et al., (2005) Blood 105(2):518-525; and White et al., (1997) J. Thromb. Haemost. 78(1):261-265. Patients can be monitored regularly over a period of time for routine or repeated administrations, following administration in response to acute events, such as hemorrhage, trauma, or surgical procedures.

### H. FORMULATION AND ADMINISTRATION

[0496] Compositions for use for gene therapy that contain the AAV vectors described herein for the treatment of bleeding disorders are provided. Such compositions contain a therapeutically effective amount of an AAV vector as described herein. Effective concentrations for administration for gene therapy are mixed with a suitable pharmaceutical carrier or vehicle for systemic, topical or local administration. Generally the gene therapy vectors are administered intravenously or by direct injection into the liver, or by direct injection into a compartmentalized liver (see, U.S. Pat. No. 9,821,114, for a description of methods of direct injection into a compartmentalized liver). Because of the properties of the vectors and encoded FIX effective dosages are at least 1 to 2 orders of magnitude lower, and, can be as much as 3 or 4 orders of magnitude lower, than prior AAV vectors encoding FIX for gene therapy to treat hemophilia.

[0497] Pharmaceutical carriers or vehicles suitable for administration of the compounds provided herein include any such carriers known to those skilled in the art to be suitable for the particular mode of administration. Pharmaceutical compositions that include a therapeutically effective amount of a FIX polypeptide described herein also can be provided as a lyophilized powder that is reconstituted, such as with sterile water, immediately prior to administration.

[0498] 1. Formulations

[0499] The pharmaceutical compositions containing the vectors can be formulated in any conventional manner by mixing a selected amount of the vector and one or more physiologically acceptable carriers or excipients. Selection of the carrier or excipient is within the skill of the administering profession and can depend upon a number of parameters. These include, for example, the mode of administration (i.e., systemic, oral, nasal, pulmonary, local, topical, or any other mode) and disorder treated. The pharmaceutical compositions provided herein can be formulated for single dosage (direct) administration or for dilution or other modification. The concentrations of the vectors in the formulations are effective for delivery of an amount, upon administration, that is effective for the intended treatment. To formulate a composition, the weight fraction of the vector is dissolved, suspended, dispersed, or otherwise mixed in a selected vehicle at an effective concentration such that the treated condition is relieved or ameliorated.

[0500] The formulation should suit the mode of administration. For example, the vectors can be formulated for parenteral administration by injection (e.g., by bolus injection or continuous infusion). The injectable compositions can take such forms as suspensions, solutions or emulsions in oily or aqueous vehicles. The sterile injectable preparation also can be a sterile injectable solution or suspension in a non-toxic parenterally-acceptable diluent or solvent, for example, as a solution in 1,4-butanediol. Sterile, fixed oils are conventionally employed as a solvent or suspending medium. For this purpose any bland fixed oil can be employed, including, but not limited to, synthetic mono- or diglycerides, fatty acids (including oleic acid), naturally occurring vegetable oils like sesame oil, coconut oil, peanut oil, cottonseed oil, and other oils, or synthetic fatty vehicles like ethyl oleate. Buffers, preservatives, antioxidants, and the suitable ingredients, can be incorporated as required, or, alternatively, can comprise the formulation.

[0501] The vectors can be formulated as the sole pharmaceutically active ingredient in the composition or can be combined with other active ingredients. The vectors can be provided in liposomes. Liposomal suspensions, including tissue-targeted liposomes, also can be suitable as pharmaceutically acceptable carriers. These can be prepared according to methods known to those skilled in the art. For example, liposome formulations can be prepared as described in U.S. Pat. No. 4,522,811. Liposomal delivery also can include slow release formulations, including pharmaceutical matrices such as collagen gels and liposomes modified with fibronectin (see, for example, Weiner et al., (1985) J. Pharm. Sci. 74(9):922-925). The compositions provided herein further can contain one or more adjuvants that facilitate delivery, such as, but are not limited to, inert carriers, or colloidal dispersion systems. Representative and non-limiting examples of such inert carriers can be selected from water, isopropyl alcohol, gaseous fluorocarbons, ethyl alcohol, polyvinyl pyrrolidone, propylene glycol, a gel-producing material, stearyl alcohol, stearic acid, spermaceti, sorbitan monooleate, methylcellulose, as well as suitable combinations of two or more thereof.

[0502] The amount of vector included in the pharmaceutically acceptable carrier in an amount sufficient to exert a therapeutically useful effect in the absence of undesirable side effects, such as immune reactions, on the subject treated. The therapeutically effective concentration can be determined empirically by testing in known in vitro and in vivo systems, such as the assays provided herein.

[0503] 2. Dosages

[0504] The precise amount or dose of the therapeutic agent administered depends on the particular encoded FIX polypeptide, the route of administration, and other considerations, such as the severity of the disease and the weight and general state of the subject. Local administration of the therapeutic agent will typically require a smaller dosage than any mode of systemic administration, although the local concentration of the therapeutic agent can, in some cases, be higher following local administration than can be achieved with safety upon systemic administration. If necessary, a particular dosage and duration and treatment protocol can be empirically determined or extrapolated. Treatment by gene therapy, generally, is a single dose or several doses spaced over a period of time. The gene therapy can last for years, but can be repeated if the levels of the encoded FIX decrease. Dosage also is function of the severity of the factor IX deficiency, and the particular subject. For example, patients with severe Hemophilia B (FIX activity of <1 IU/dL; 1% of normal activity (where 1 IU represents the activity of Factor IX in 1 mL of normal, pooled plasma)) will require more FIX than patients with moderate (FIX activity of 1-5 IU/dL; 1-5% of normal activity), or mild (FIX activity of >5-<40 IU/dL; >5-<40% of normal activity) hemophilia B. For comparison, the initial estimated dose of BeneFIX® Factor IX can be determined using the following formula: Required units=body weight (kg)×desired factor IX increase (IU/dL or % of normal)×reciprocal of observed recovery (IU/kg per IU/dL). In clinical studies with adult and pediatric (<15 years) patients, one IU of BeneFIX® FIX per kilogram of body weight increased the circulating activity of Factor IX as follows: Adults: 0.8±0.2 IU/dL [range 0.4 to 1.2 IU/dL]; Pediatric: 0.7±0.3 IU/dL [range 0.2 to 2.1 IU/dL]. Thus, for adult patients: the number of Factor IX IU required (IU)=body weight (kg) x desired factor IX increase (% or IU/dL)×1.3 (IU/kg per IU/dL), and, for pediatric patients: the number of Factor IX IU required (IU)=body weight (kg) x desired factor IX increase (% or IU/dL)×1.4 (IU/kg per IU/dL).

[0505] The dosage regimen can be any of a variety of methods and amounts, and can be determined by one skilled in the art according to known clinical factors. As is known in the medical arts, dosages for any one patient can depend on many factors, including the subject's species, size, body surface area, age, sex, immunocompetence, and general health, the particular virus to be administered, duration and route of administration, the kind and stage of the disease, for example, the severity of the hemophilia, and other treatments or compounds, being administered concurrently. In addition to the above factors, such levels can be affected by the transduction and tropism potential of the AAV, and composition of the AAV vector, including the composition of the cassette flanked by the ITRs (e.g., promoter, enhancer or ITR composition), as can be determined by one skilled in the art.

[0506] Clinical trials of AAV-FIX have been conducted. In a completed trial, subjects were dosed with a single dose of AAV-FIX encoding hFIX (DTX101) at 1.6 E+12 or 5 E+12 genome copies/kg (gc/kg) via intravenous infusion (ClinicalTrials.gov Identifier: NCT02618915). Another completed clinical trial (ClinicalTrials.gov Identifier: NCT 02484092; Spark Therapeutics and Pfizer) in which patients were infused with AAV encoding FIX R338L (Padua) under control of a liver specific promoter at 5 E+11 vg/kg showed increased FIX coagulant activity (mean steady state activity of 33.7±18.5%). After 492 weeks, the annualized bleeding rate was significantly reduced compared to before vector administration (see, George et al. (2017) New Eng. J. Med. 377:2215-2227). In another clinical study, fifteen adult hemophilia B patients were infused with 5 E+11 vg/kg of fidanacogene elaparvovec (Pfizer/Spark Therapeutics). The results show that at one year post vector infusion, the mean post-infusion steady-state of FIX was 22.9%±9.9%. Mean ABR during the first 52 weeks following fidanacogene elaparvovec infusion was 0.4±1.1 compared to 8.9±14.0 in the 52 weeks preceding infusion (p<0.001). No bleeds were reported in 80% of patients, and all patients reported reduced bleeding frequency and decreased FIX use for the 52 weeks post-vector infusion. All patients reported no serious adverse events (Dec. 8, 2019: Presented at ASH annual Meeting Poster 3347).

[0507] Other clinical trials for treatment of hemophilia with AAV-FIX were ongoing in 2020 (ClinicalTrials.gov Identifiers: NCT 03185897; NCT 03861273 and NCT03587116 (both rAAV Spark100 hFIX Padua)). For example, subjects are dosed with a single dose of AAV-FIX (BBM-H901) at 5 E+12 vg/kg via intravenous infusion (ClinicalTrials.gov Identifier: NCT04135300). In another example, subjects are dosed with a single dose of AAV5-Padua FIX under control of a liver specific promoter (AMT-061) at 2 E+13 genome copies/kg (gc/kg) (i.e., vector genomes/kg) via intravenous infusion (ClinicalTrials.gov Identifier: NCT03489291).

[0508] In the methods herein, appropriate minimum dosage levels and dosage regimes of viruses, such as an AAV vector packaged in a capsid, such as the AAV vector and capsid described herein, can be levels sufficient for AAV delivery to the target site (e.g., the liver) and for the AAV to transduce the target tissue, such as the liver (e.g., hepatocytes). The dosages using the AAV vectors provided and described herein should be at least 1 order of magnitude lower than those in the previous clinical studies, such as those discussed above.

[0509] Generally, the capsid packaged AAV for expressing FIX (e.g., the modified FIX polypeptide set forth in SEQ ID NO: 394 or others of the modified FIX polypeptides provided herein) is administered in an amount that is at least or about or 1 E+10 vector genomes/kg of body weigh at least one time over a cycle of administration. Lower doses also are contemplated; particular doses are within the skill of the skilled practitioner. Factors include the severity of the hemophilia. Exemplary minimum levels for administering a virus to a 75 kg human can include at least about 1×10¹¹, or at least 1×10¹¹ vector genomes (vg), at least about 5×10¹¹ vg, at least about 1×10¹² vg, at least about 5×10¹² vg, at least about 1×10¹³ vg, at least about 5×10¹³ vg, at least about 1×10¹⁴ vg, or at least about 5×10¹⁴ vg. For example, the virus is administered in an amount that is at least or about or is 1×10¹¹ vg, 1×10¹² vg, 1×10¹³ vg, or 1×10¹⁴ vg, at least one time over a cycle of administration. For some subjects, a single dosage is sufficient for expression to be sustained for at least a year, generally longer.

[0510] For the vectors provided herein, dosages can be at least one order of magnitude lower than prior art doses. Reported AAV gene therapy doses include 2 e+13, 5 e+11, 2 e+12, and 4.5 e+11 vg/kg or gc/kg. The vectors herein can be dosed as low as 1 e+8 depending upon the route of administration. For example, as shown in the Examples below in the mouse models, compared to the TAK vector, the exemplified vectors herein, dosed at 8 e+10 vg/kg dose in mice achieved results comparable to the TAK vector, which was dosed at 7.4 e+11 vg/kg resulting in ˜20 U/mL. Thus, the vectors herein provide at least 10-fold more FIX, and can be dosed at least 1/10 dose. As described herein, the target for treatment is to result at least mild hemophilia, in which the activity of FIX is 20-50%, such as at least 30% or at least 40%, FIX, up to normal (50%-150%).

[0511] 3. Administration of the Vectors Encoding Modified FIX Polypeptides

[0512] As described herein, the vectors generally are administered intravenously or by direct injection into the liver as detailed herein and known to those of skill in the art. The nucleic acids packaged in the capsid provided herein can be administered to a subject, including a subject having hemophilia, for therapy. An administered AAV vector packaged in the capsid provided herein can be any AAV described herein or any other AAV generated using the methods provided herein. In some examples, the AAV administered is an AAV containing a characteristic such as attenuated pathogenicity, low toxicity, preferential accumulation in the tissue or cells of interest (e.g., liver cells), low immunogenicity, replication competence and ability to express encoded proteins, and combinations thereof. The AAV viruses can be administered by direct injection into a compartmentalized liver (see, U.S. Pat. No. 9,821,114) in which the liver is clamped to isolate all or a portion from systemic circulation, the virus is injected into the parenchyma, compartmentalization is maintained for at least 25 or 30 minutes up to one hour to effect quantitative uptake of the injected virus.

### I. THERAPEUTIC USES

[0513] The vectors provided herein can be used for treatment of any condition for which unmodified FIX is employed. The modified polypeptides encoded in the vectors are designed to exhibit modified properties, such as improved pharmacokinetic and pharmacodynamic properties, increased resistance to inhibitors and/or improved catalytic activity. Such modified properties and activities, for example, improve the therapeutic effectiveness. This section provides exemplary uses of and administration methods. These described therapies are exemplary only and do not limit the applications of modified FIX polypeptides.

[0514] Among the uses for recombinant and modified coagulation factors are treatments of hemophilias. Hemophilia A is treated with FVIII, and Hemophilia B with FIX. Subjects with antibodies (inhibitors) against their replacement factor, generally against FVIII are treated with bypass agent: FVIIa or factor eight inhibitor bypass activity (FEIBA). The encoded modified FIX polypeptides described herein exhibit improved pharmacokinetic and pharmacodynamic properties, increased catalytic activity, increased resistance to inhibitors and/or increased coagulant activity compared to an unmodified FIX polypeptide. The encoded modified FIX polypeptides provided herein exhibit improved coagulant activity, as well as increased half-life and bioavailability, compared to unmodified FIX. Typically they are at least about 7-fold more potent than wild-type FIX products, such as BeneFIX® FIX, and as much or more than 20-fold more potent. This increased potency and the AAV vectors provided herein, such as the AAV with the capsid designated KP1, that have enhanced liver tropism, result in a therapeutic for gene therapy that can be effectively used for treating hemophilia to provide normal or near-normal coagulant activity or at least sufficient activity to result in mild hemophilia (greater than at least 10%, 20%, 30%, 40% up to 50% activity), or normal clotting (above about 40% or 50%).

[0515] Dosage levels and regimens can be determined based upon known dosages and regimens, and, if necessary can be extrapolated based upon the changes in properties of the modified polypeptides and/or can be determined empirically based on a variety of factors. Such factors include body weight of the individual, general health, age, the activity of the specific compound employed, sex, diet, time of administration, rate of excretion, drug combination, the severity and course of the disease, and the patient's disposition to the disease and the judgment of the treating physician.

[0516] The effect of the encoded FIX polypeptides on the clotting time of blood can be monitored using any of the clotting tests known in the art including, but not limited to, whole blood partial thromboplastin time (PTT), the activated partial thromboplastin time (aPTT), the activated clotting time (ACT), the recalcified activated clotting time, or the Lee-White Clotting time.

[0517] 1. Hemophilia

[0518] Hemophilia is an ancient disease only brought under control in the last 50 years and is characterized by an inherited congenital tendency of males to bleed. Estimates, based on the World Federation of Hemophilia's (WFH) annual global surveys, indicate that the number of people with hemophilia in the world is approximately 190,000, 30,000 of which are affected by hemophilia B specifically. Hemophilia B, first described in 1952 (Biggs et al., (1952) British Medical Journal, 1378-1382) was named after Stephen Christmas, a five year old British boy and the first patient described with hemophilia B. Thus, hemophilia B is also referred to as “Christmas disease” to differentiate from the more prevalent hemophilia A, or “classic hemophilia”. Hemophilia B is a recessive X-linked blood coagulation disorder leading to a deficiency of functional factor IX, one of the serine proteases of the intrinsic pathway of the coagulation cascade of secondary hemostasis (see, FIG. 1) In hemophilia B, the deficiency of FIX results in the reduction of a functioning intrinsic tenase complex, leading to diminished thrombin generation and an inability to form and maintain a stable clot (Franchini et al. (2013) Biologics 7:33-38). Severe deficiency of FIX leads to recurrent hemarthroses and bleeding episodes in soft tissues and other organs (Escobar et al. (2013) J. Thromb. Haemost. 11:1449-1453).

[0519] Hemophilia is a bleeding disorder that is caused by a deficiency in one or more blood coagulation factors. It is characterized by a decreased ability to form blood clots at sites of tissue damage. Congenital X-linked hemophilias include hemophilia A and hemophilia B, or Christmas disease, which are caused by deficiencies in FVIII and FIX, respectively. Hemophilia A occurs at a rate of 1 out of 10,0000 males, while hemophilia B occurs in 1 out of 50,000 males.

[0520] Hemophilia B is the second most common form of hemophilia (approximately 20% of hemophilia cases); it is estimated to occur in one in 30,000 live male births across all ethnic groups. Because hemophilia is an X-linked, recessive condition, it occurs predominantly in males (Franchini et al. (2013) Biologics 7:33-38). Symptoms of hemophilia B include recurrent prolonged bleeding resulting from reduced levels or an absence of plasma FIX, whose function is to cleave and activate FX within the coagulation cascade (Goodeve (2015) J. Thromb. Haemost. 13:1184-1195). Existing treatment relies mainly on replacement therapy with clotting factors, either at the time of bleeding or as part of a prophylaxis schedule. The major complication of such therapy is the development of neutralizing antibodies, which is most frequently observed in patients affected with hemophilia A (Escobar et al. (2013) 1 Thromb. Haemost. 11:1449-1453).

[0521] Hemophilia B is a congenital bleeding disorder caused by a deficiency or structural abnormality of coagulation FIX. The FIX gene is located on the X chromosome and is therefore inherited as an X-linked recessive trait (Bowen (2002) J. Clin. Pathol. 55:127-144). Hemophilia B can also arise spontaneously without a positive family history which is the case in approximately 30% of affected individuals. Females that carry an X chromosome with a defective FIX gene are called carriers and they normally do not present with bleeding symptoms as their other X chromosome has a normal copy of the FIX gene, however random suppression of one of the X chromosomes during fetal development may result in symptomatic hemophilia B. Sons and daughters of a carrier female have a 50% chance of inheriting the disease-carrying X chromosome and thus to be affected by the disorder or to be a carrier female, respectively. All female offspring of an affected male will carry the defective FIX gene.

[0522] Patients with hemophilia suffer from recurring joint and muscle bleeds, which can be spontaneous or in response to trauma. The bleeding can cause severe acute pain, restrict movement, and lead to secondary complications including synovial hypertrophy. Furthermore, the recurring bleeding in the joints can cause chronic synovitis, which can cause joint damage, destroying synovium, cartilage, and bone.

[0523] A goal of gene therapy for treating hemophilia is for the treated subject to have normal clotting levels. In severe hemophilia, in which a subject has about 30 or more bleeds/year, the level of clotting activity is 1% or less; in moderate hemophilia the subject has about 15-20 bleeds/year, and clotting activity greater than about 1% and up to about 5%; normal in mild hemophilia a subject has clotting levels of greater than 5% up to about 40-50%. Normal clotting activity is above 40-50% clotting activity. A goal of gene therapy is to restore activity to normal or at least mild hemophilia, generally greater than 10%, 12%, 20%, 40% or higher activity.

[0524] 2. Pathophysiology

[0525] Hemophilia B is a coagulation factor deficiency resulting from reduced levels or an absence of FIX. FIX is a vitamin K-dependent plasma protease that participates in the intrinsic blood coagulation pathway which occurs through a series of enzymatic reactions (see below and also FIG. 1 showing the intrinsic and extrinsic pathways of the coagulation cascade leading to Fibrin formation).

[chemical structure]

[0526] FVIII and FIX are synthesized in the liver and circulate as inactive precursors. They are activated, on demand, at the time of vascular injury, via the intrinsic or extrinsic pathways of the coagulation cascade. Factor VIII is a protein cofactor and factor IX is a serine protease which requires factor VIII as cofactor (Bowen (2002) J. Clin. Pathol. 55:127-144). Symptoms of recurrent prolonged bleeding result from reduced levels or an absence of plasma FIX, whose function is to cleave and activate FX within the coagulation cascade. FIX circulates as a zymogen, and is activated to activated FIX (FIXa) by sequential cleavage at p.Arg191-Ala192 and p.Arg226-Val227 by activated FXI or tissue factor-activated FVII. With activated FVIII as a cofactor providing correct orientation, FIXa cleaves FX resulting in its activation (Goodeve (2015) J. Thromb. Haemost. 13:1184-1195). In the common pathway, Factor Xa (generated through the intrinsic or extrinsic pathways) forms a prothrombinase complex with phospholipids, calcium ions, and thrombin-activated Factor Va. The complex cleaves prothrombin into thrombin and prothrombin fragments 1 and 2. Thrombin converts fibrinogen into fibrin, the structural polymer of the blood

[0527] In patients with hemophilia B, the activation of factor X is compromised due to the insufficient activity of the tenase complex brought about by deficiency of FIX enzyme activity. This significantly impairs clot formation and, as a consequence, results in spontaneous hemorrhage and/or prolonged bleeding episodes in response to injury or trauma (Bowen (2002) J. Clin. Pathol. 55:127-144). Apart from the functional differences of FVIII and FIX, there are other differences in the pathophysiology of hemophilia A compared with hemophilia B. One major difference is the half-life (T½) of the impacted protein. FVIII has a half-life (t½) 8 to 14 hours, while that of Factor IX is 18 to 24 hours.

[0528] 3. Clinical Characteristics

[0529] Hemophilia B is characterized by a deficiency in FIX clotting activity that results in delayed or recurrent bleeding prior to complete wound healing after injuries, tooth extractions or surgery. Muscle hematomas or intracranial bleeding can occur immediately or up to four to five days after the original injury. Intermittent oozing may last for days or weeks after tooth extraction. Prolonged or delayed bleeding or wound hematoma formation after surgery is common. After circumcision, males with hemophilia B of any severity may have prolonged oozing, or they may heal normally. In severe hemophilia B, spontaneous joint bleeding is the most frequent symptom. The severity of bleeding manifestations in hemophilia is generally correlated with the clotting factor level as shown in Table 14, below. In patients with severe hemophilia, when untreated, bleeding in the joints may occur as frequently as 30-50 times a year.

TABLE 14
Correlation of Clotting Factor Levels with Severity of Hemophilia

| | Clotting | |
|---|---|---|
| | factor level | |
| | % activity | |
| Severity | (IU/ml) | Bleeding episodes |
| Severe | <1 IU/dl | Spontaneous bleeding, predominantly in joints and muscles and |
| | (<0.01 | often in the absence of identifiable hemostatic challenge. Usually |
| | IU/ml) | diagnosed during the first two years of life; without prophylactic |
| | or <1% | treatment, they may average up to two to five spontaneous |
| | of normal | bleeding episodes each month. |
| Moderate | 1-5 IU/dl | Occasional spontaneous bleeding. Prolonged bleeding with |
| | (0.01- | trauma and surgery. Usually diagnosed before age five to six |
| | 0.05 IU/ml) | years; the frequency of bleeding episodes varies from once a |
| | or 1-5% | month to once a year. |
| | of normal | |
| Mild | 5-40 IU/dl | Severe bleeding with major trauma or surgery without pre- and |
| | (0.05- | post-operative treatment. Spontaneous bleeding is rare; the |
| | 0.40 IU/ml) | frequency of bleeding may vary from once a year to once every ten |
| | or 5-<40% | years. Individuals with mild hemophilia are often not diagnosed |
| | of normal | until later in life. |

Source: Adapted from (Konkle et al., 2000; World Federation of Hemophilia - Guidelines for the management of hemophilia 2nd edition, 2013)

[0530] 4. Hemophilia B

[0531] Hemophilia B can be effectively managed with administration of FIX therapeutics. Patients with severe Hemophilia B have an FIX activity of <1 IU/dL (1% of normal activity), patients with moderate Hemophilia B have a FIX activity of 1-5 IU/dL (1-5% of normal activity) and patients with mild hemophilia B have a FIX activity of >5-<40 IU/mL (>5-<40% of normal activity). With proper prophylactic replacement therapy and/or treatment of particular bleeding episodes with an appropriate amount of FIX, patients often can achieve normal life span. Administration of FIX can aid in controlling bleeding during surgery, trauma, during dental extraction, or to alleviate bleeding associated with hemarthrosis, hematuria, mucocutaneous bleeding, such as epistaxis or gastrointestinal tract bleeding, cystic lesions in subperiosteal bone or soft tissue, or hematomas, which cause neurological complications such as intracranial bleeding, and spinal canal bleeding. Death in patients with hemophilia is often the result of bleeding in the central nervous system. Other serious complications in hemophilic patients include development of inhibitors to coagulation factor therapeutics and disease.

[0532] The most frequent alterations in the FIX gene in hemophilia B patients are point mutations, in particular missense mutations. Most of the identified FIX mutations occur in amino acid residues in the coding region of the FIX gene, often affecting evolutionarily conserved amino acids. The severity of the hemophilia depends upon the nature of the mutation. Mutations in the coding region can affect a number of different properties or activities of the FIX polypeptide including alteration of protease activity, cofactor binding, signal peptide or propeptide cleavage, post-translational modifications, and inhibition of cleavage of FIX into its activated form. Other types of point mutations include nonsense mutations that produce an unstable truncated FIX polypeptide, and frameshift mutations (small deletions and insertions) that result in a terminally aberrant FIX molecule. In addition, FIX point mutations can be found in the promoter region, which can disrupt the recognition sequences for several specific gene regulatory proteins, resulting in reduced transcription of coagulation factor IX. Decreased FIX as a result of transcriptional abnormalities is called Hemophilia B Leyden. An exemplary mutation in the promoter region includes disruption of the HNF-4 binding site, which affect regulation of FIX transcription by the androgen receptor. The severity of this type of hemophilia is governed by the levels of androgen in the blood, which increase during puberty and partially alleviate the FIX transcriptional deficiency (Kurachi and Kurachi (1995) Thrombosis and Haemostasis 73(3):333-339). Other missense nucleotide changes affect the processing of factor IX primary RNA transcript. For example, some mutations occur at evolutionarily conserved donor-splice (GT), and acceptor-splice (AG) consensus sequences, which can create cryptic splice junctions and disrupt assembly of spliceosomes. Some severe cases of hemophilia (approximately 10%) present with large deletions in the FIX gene.

[0533] Treatment of FIX deficiency, and thus hemophilia B, most often involves administration of FIX, including recombinant forms of FIX, purified plasma FIX preparations or purified plasma concentrates. Thus, similarly, the modified FIX polypeptides herein, and nucleic acids encoding modified FIX polypeptides, can be used for treatment of hemophilia B. The modified FIX polypeptides herein can exhibit improved pharmacokinetic and pharmacodynamic properties, such as improved serum half-life, increased resistance to inhibitors, increased catalytic activity, and/or increased coagulant activity. Thus, modified FIX polypeptides can be used to deliver improved therapies for hemophilia. Examples of therapeutic improvements using modified FIX polypeptides include for example, but are not limited to, lower dosages, fewer and/or less frequent administrations, decreased side effects, and increased therapeutic effects.

[0534] Hemophilia B is an X-linked genetic disease caused by a mutation in the gene of coagulation factor IX (FIX). Hemophilia B patients have spontaneous internal bleeding occurring mainly in muscles and joints, resulting in chronic joint injury, and have poor hemostasis. Hemophilia B severity is categorized as mild (5%-40% of normal blood FIX activity; 5-40 IU/dL), moderate (1%-5%; 1-5 IU/dL), and severe (<1%; <1 IU/dL). Treatment of bleeding episodes in type B hemophilia has accomplished by supplementing FIX by intravenous (IV) injection. FIX products used for treatment of bleeding episodes include plasma-derived FIX (isolated and concentrated from human blood) and recombinant wild-type FIX (rwt-FIX), which is more desirable due to concerns of infection by human viruses with plasma-derived FIX. During hemostasis, the dose of FIX administered varies according to the severity of the bleeding and the weight of the patient.

### J. COMBINATION THERAPIES

[0535] The gene therapy provided herein can be supplemented with other treatments, including FIX polypeptide treatment, and other therapeutic agents or procedures including, but not limited to, other biologics, small molecule compounds and surgery. For any disease or condition, including all those exemplified above, for FIX is indicated or has been used and for which other agents and treatments are available, FIX can be used in combination therewith. Hence, the modified FIX polypeptides provided herein similarly can be used. Depending on the disease or condition to be treated, exemplary combinations include, but are not limited to combination with other plasma purified or recombinant coagulation factors, procoagulants, anticoagulants, anti-coagulation antibodies, glycosaminoglycans, heparins, heparinoids, heparin derivatives, heparin-like drugs, coumarins, such as warfarin, and coumarin derivatives. Additional procoagulants that hat have procoagulant properties can be administered. These include, but are not limited to, vitamin K, vitamin K derivatives, other coagulation factors, and protein C inhibitors. Additional anticoagulants that can be used in combination therapies with modified FIX polypeptides provided herein that have anticoagulant properties include, but are not limited to, β2 adrenoreceptor antagonists, neuropeptide V2 antagonists, prostacyclin analogs, thromboxane synthase inhibitors, calcium agonists, elastase inhibitors, non-steroidal anti-inflammatory molecules, thrombin inhibitors, lipoxygenase inhibitors, FVIIa inhibitors, FXa inhibitors, phosphodiesterase III inhibitors, fibrinogen, vitamin K antagonists, and glucoprotein IIb/IIIa antagonists.

### K. EXAMPLES

[0536] Examples 1-9 are reproduced from U.S. Pat. Nos. 9,328,339 and 8,778,870, which describe variants of FIX (modified FIX) polypeptides that have increased coagulation activity. Among these also are modified FIX polypeptides that have increased resistance to an endogenous protease or proteases and/or increased coagulation activity. Provided herein are constructs that contain nucleic acid encoding any these modified FIX that have increased coagulation activity and/or increased resistance to an endogenous protease. The constructs include ITRs from AAV and regulatory sequences for gene therapy for expression in an animal, such as a human. The FIX encoding nucleic acid includes an intron, which increases expression in an animal. AAV capsids containing the constructs also are provided. The capsids have tropism for transducing hepatocytes so that the encoded FIX, when administered transduce the liver. The constructs include liver-specific promoters, so that the encoded FIX is expressed in liver. The capsids are recombinant AAV capsids that are generated and selected to have increased tropism for liver compared to any AAV serotype, include AAV8, and also compared to the recombinant AAV, designated DJ/8 (or DJ8). Among these are capsids that have tropism for liver, and also have tropism for islet cells. Examples 10-16 describe the generation of the capsids, and their use to encode and express modified FIX for gene therapy.

### Example 1

### Cloning and Expression of Factor IX Polypeptides

### A. Cloning of FIX Gene

[0537] The nucleic acid encoding the 461 amino acid human FIX precursor polypeptide (P00740; set forth in SEQ ID NO:1) was cloned into the mammalian expression vector, pFUSE-hIgG1-Fc2 (abbreviated here as pFUSE) (InvivoGen; SEQ ID NO:23), which contains a composite promoter, hEF1-HTLV, comprising the Elongation Factor-1α (EF-1α) core promoter and the R segment and part of the U5 sequence (R-U5′) of the human T-Cell Leukemia Virus (HTLV) Type 1 Long Terminal Repeat. The In-Fusion CF Dry-Down PCR Cloning Kit (Clontech) was used according to the conditions specified by the supplier.

[0538] For the In-Fusion process, plasmid pFUSE without the human immunoglobulin 1 (hIgG1) Fc portion was linearized using polymerase chain reaction (PCR) with the pFUSE-Acc-F1 forward primer: GTGCTAGCTGGCCAGACATGATAAG (SEQ ID NO:24) and the pFUSE-Acc-R3 reverse primer: CATGGTGGCCCTCCTTCGCCGGTGATC (SEQ ID NO:25), and was used as Acceptor DNA. The full-length coding sequence of FIX was amplified by PCR using human FIX cDNA (Origene) as template with the FIX-wtsp-Invivo-F1 forward primer: CGAAGGAGGGCCACCATGCAGCGCGTGAACATGATC (SEQ ID NO:26) and FIX-Invivo-R1 reverse primer: TGTCTGGCCAGCTAGCACTTAAGTGAGCTTTGTTTTTTCC (SEQ ID NO:27). For two FIX Donor amplification primer sequences set forth above, both FIX ‘ATG’ start and complementary sequence of ‘TAA’ stop codons are underlined in the forward and reverse primer sequences, respectively. The 18-nt long homology regions, a non-annealing 5′ primer tail for In-Fusion, are shown in bold. Standard PCR reaction and thermocycling conditions were used in conjunction with the Phusion High-Fidelity Master Mix Kit (New England Biolabs), as recommended by the manufacturer. Both Acceptor and Donor PCR products were then digested with DpnI restriction enzyme to remove E. coli-derived dam methylated PCR template backgrounds. They were then mixed together, and the In-Fusion reaction was run using conditions specified by the supplier. The reaction mix was transformed into E. coli XL1Blue supercompetent cells (Stratagene). Colonies were selected on 2xYT agar plates supplemented with 25 ppm Zeocin (InvivoGen). Plasmid DNA was isolated from selected clones, and sequenced to verify correct cloning.

### B. Generation of FIX Variants

[0539] FIX variants were generated using the QuikChange Lightning Site-Directed Mutagenesis Kit (Stratagene) according to manufacturer's instructions with specifically designed oligonucleotides that served as primers to incorporate designed mutations into the newly synthesized DNA. Complementary primers that include the desired mutations were extended during cycling using purified, double-stranded super-coiled pFUSE plasmid DNA that contained the cloned FIX cDNA sequence as a template. Extension of the primers resulted in incorporation of the mutations of interest into the newly synthesized strands, and resulted in a mutated plasmid with staggered nicks. Following amplification, the mutagenesis product was digested with DpnI restriction enzyme to remove dam methylated parental strands of the E. coli-derived pFUSE DNA. The DNA was then transformed into E. coli XL1Blue supercompetent cells (Stratagene) followed by selection on 2xYT agar plates supplemented with 25 ppm Zeocin (InvivoGen). Plasmid DNA was isolated from selected clones, and sequenced to verify for incorporation of mutation(s) at the desired location(s) on the FIX gene.

[0540] The nucleotide sequence of one of the oligonucleotides from each complementary primer pair used to generate the FIX variants is provided in Table 15. The nucleotide triplet sequences that encode a substituted amino acid are shown in uppercase. For example, to generate a FIX variant containing the substitutions A103N/N105S (A[103]N/N[105]S by chymotrypsin numbering; SEQ ID NO:77), the A103N/N105S-Forward primer, and a primer that is complementary to A103N/N105S-Forward, were used to replace a 9-bp ‘GCTgatAAC’ wild-type sequence with a 9-bp ‘AATgatAGC’ mutant sequence (changed nucleotide triplets are denoted by upper case).

[0541] Table 15, below, sets forth the oligonucleotide primers used for FIX mutagenesis. The mutant triplets are shown in upper case, and primer names correspond to the mutation, by chymotrypsin numbering, produced as a result of the mutagenesis using the primer.

TABLE 15
Oligonucleotide Primers for FIX Mutagenesis

| | | SEQ |
|---|---|---|
| Primer Name | Primer Sequence (5′ to 3′) | ID NO. |
| F9-A[103]N/ | gtaaaaatagtAATgatAGCaaggtggtttg | 28 |
| N[105]S-For | | |
| F9-D[104]N/ | gtaaaaatagtgctAATaacAGTgtggtttgctoctgtactg | 29 |
| K[106]S-For | | |
| F9-K[106]N/ | gtgctgataacAATgtgAGTtgctoctgtactg | 30 |
| V[108]S-For | | |
| F9-D[85]N-For | gaactgtgaattaAATgtaacatgtaac | 31 |
| F9-T[148]A-For | ctcacccgtgctgagGCTgtttttcctgatgtg | 32 |
| F9-D39N/F41T-For | gaatggtaaagttAATgcaACCtgtggaggctctatc | 33 |
| F9-K63N-For | gaaactggtgttAACattacagttgtcgc | 34 |
| F9-I86S-For | gcgaaatgtgAGTcgaattattcctc | 35 |
| F9-A95bS-For | caactacaatgcaAGTattaataagtacaac | 36 |
| F9-K243N-For | aaggaaaaaacaAATctcacttaagtgctagctg | 37 |
| F9-E240N-For | ctggattaagAATaaaacaaagctc | 38 |
| F9-E74N-For | caggtgaacataatattAACgagacagaacatacag | 39 |
| F9-T76N/H78S-For | gaacataatattgaggagAACgaaAGTacagagcaaaag | 40 |
| F9-K82N/N845-For | cagaacatacagagcaaAATcgaTCTgtgattcgaattattc | 41 |
| F9-L153N-For | gggagatcagctAATgttcttcagtac | 42 |
| F9-F145N/H147S- | ctggggaagagtcAACTCCaaagggagatcag | 43 |
| For | | |
| F9-K222N/K224S- | gagtgtgcaatgAACggcTCAtatggaatatatac | 44 |
| For | | |
| F9-S151N/L153S- | cttccacaaagggagaAATgctTCAgttcttca | 45 |
| For | | |
| F9-N95S-For | cctcaccacaactacAGTgcagctattaataagtacaacc | 46 |
| F9-Y117N-For | cttagtgctaaacagcAACgttacacctatttgc | 47 |
| F9-G149N-For | ggaagagtcttccacaaaAACagatcagctttagttc | 48 |
| F9-R150N/A152S- | gtcttccacaaagggAACtcaTCTttagttcttcagtac | 49 |
| For | | |
| F9-R150A-For | gtcttccacaaagggGCAtcagctttagttcttcag | 50 |
| F9-R150E-For | gtcttccacaaagggGAAtcagctttagttcttcag | 51 |
| F9-R150Y-For | gtcttccacaaagggTACtcagctttagttcttcag | 52 |
| F9-R143Q-For | gtaagtggctggggaCAAgtcttccacaaaggg | 53 |
| F9-R143A-For | gtaagtggctggggaGCAgtcttccacaaaggg | 54 |
| F9-R143Y-For | gtaagtggctggggaTACgtcttccacaaaggg | 55 |
| F9-R143L-For | gtaagtggctggggaCTGgtcttccacaaaggg | 56 |
| F9-V38M-For | gttttgaatggtaaaATGgatgcattctgtggaggc | 57 |
| F9-V38Y-For | gttttgaatggtaaaTACgatgcattctgtggaggc | 58 |
| F9-D39M-For | gttttgaatggtaaagttATGgcattctgtggaggc | 59 |
| F9-D39Y-For | gttttgaatggtaaagttTACgcattctgtggaggc | 60 |
| F9-A40M-For | gttttgaatggtaaagttgatATGttctgtggaggctctatc | 61 |
| F9-A40Y-For | gttttgaatggtaaagttgatTACttctgtggaggctctatc | 62 |
| F9-R233A/K230A- | caaatatggaatatataccGCAgtatccGCAtatgtcaactgg | 63 |
| For | attaag | |
| F9-R233E/K230E- | caaatatggaatatataccGAAgtatccGAAtatgtcaactgg | 64 |
| For | attaag | |
| F9-R233A-For | gaatatataccaaggtatccGCAtatgtcaactggattaag | 65 |
| F9-R233E-For | gaatatataccaaggtatccGAAtatgtcaactggattaag | 66 |
| F9-K230A-For | caaatatggaatatataccGCAgtatcccggtatgtc | 67 |
| F9-K230E-For | caaatatggaatatataccGAAgtatcccggtatgtc | 68 |
| F9-K126E-For | cctatttgcattgctgacGAAgaatacacgaacatc | 69 |
| F9-K126A-For | cctatttgcattgctgacGCAgaatacacgaacatc | 70 |
| F9-R165A-For | gttccacttgttgacGCAgccacatgtcttcgatct | 71 |
| F9-R165E-For | gttccacttgttgacGAAgccacatgtcttcgatct | 72 |
| F9-R170A-For | cgagccacatgtcttGCAtctacaaagttcacc | 73 |
| F9-R170E-For | cgagccacatgtcttGAAtctacaaagttcacc | 74 |
| F9-D[64]N-For | ggcggcagttgcaagAACgacattaattcctatG | 273 |
| F9-D[64]A-For | ggcggcagttgcaagGCTgacattaattcctatG | 274 |
| F9-N[157]Q-For | cctgatgtggactatgtaCAGtctactgaagctgaaacc | 275 |
| F9-N[157]D-For | cctgatgtggactatgtaGACtctactgaagctgaaacc | 276 |
| F9-N[167]Q-For | gaaaccattttggatCAGatcactcaaagcacc | 277 |
| F9-N[167]D-For | gaaaccattttggatGACatcactcaaagcacc | 278 |
| F9-S[61]A-For | ccatgtttaaatggcggcGCTtgcaaggatgacattaattcc | 279 |
| F9-S[53]A-For | gatggagatcagtgtgagGCTaatccatgtttaaatggc | 280 |
| F9-T[159]A-For | gtggactatgtaaattctGCTgaagctgaaaccattttg | 281 |
| F9-T[169]A-For | CattttggataacatcGCTcaaagcacccaatcatttaatgac | 282 |
| F9-T[172]A-For | gataacatcactcaaagcGCTcaatcatttaatgac | 283 |
| F9-T[179]A-For | caatcatttaatgacttcGCTcgggttgttggtggagaaG | 284 |
| F9-Y[155]F-For | gtttttcctgatgtggacTTCgtaaattctactgaagctG | 285 |
| F9-Y[155]H-For | gtttttcctgatgtggacCACgtaaattctactgaagctG | 286 |
| F9-Y[155]Q-For | gtttttcctgatgtggacCAGgtaaattctactgaagctG | 287 |
| F9-S[158]A-For | gtggactatgtaaatGCTactgaagctgaaacc | 288 |
| F9-S[158]D-For | gtggactatgtaaatGACactgaagctgaaacc | 289 |
| F9-S[158]E-For | gtggactatgtaaatGAGactgaagctgaaacc | 290 |
| F9-R165S-For | gttccacttgttgacAGCgccacatgtottcgatct | 291 |
| F9-R170L-For | cgagccacatgtcttCTGtctacaaagttcacc | 292 |
| F9-K148N-For | ggaagagtottccacAACgggagatcagotttaG | 293 |
| F9-K148A-For | ggaagagtcttccacGCTgggagatcagctttaG | 294 |
| F9-K148E-For | ggaagagtcttccacGAGgggagatcagctttaG | 295 |
| F9-K148S-For | ggaagagtottccacAGCgggagatcagotttaG | 296 |
| F9-K148M-For | ggaagagtottccacATGgggagatcagotttaG | 297 |
| F9-E74S-For | ggtgaacataatattAGCgagacagaacatacaG | 298 |
| F9-E74A-For | ggtgaacataatattGCTgagacagaacatacaG | 299 |
| F9-E74R-For | ggtgaacataatattAGGgagacagaacatacaG | 300 |
| F9-E74K-For | ggtgaacataatattAAGgagacagaacatacaG | 301 |
| F9-H92F-For-Corr | cgaattattcctcacTTCaactacaatgcaGC | 302 |
| F9-H92Y-For-Corr | cgaattattcctcacTACaactacaatgcaGC | 303 |
| F9-H92E-For-Corr | cgaattattcctcacGAAaactacaatgcaGC | 304 |
| F9-H92S-For-Corr | cgaattattcctcacAGCaactacaatgcaGC | 305 |
| F9-T242A-For | CtggattaaggaaaaaGCTaagctcacttaagtg | 306 |
| F9-T242V-For | CtggattaaggaaaaaGTGaagctcacttaagtg | 307 |
| F9-E240N/T242A- | gtcaactggattaagAACaaaGCTaagctcacttaagtg | 308 |
| For | | |
| F9-E240N/T242V- | gtcaactggattaagAACaaaGTGaagctcacttaagtg | 309 |
| For | | |
| F9-E240Q-For | gtcaactggattaagCAGaaaacaaagctcacttaaG | 310 |
| F9-E240S-For | gtcaactggattaagAGCaaaacaaagctcacttaaG | 311 |
| F9-E240A-For | gtcaactggattaagGCTaaaacaaagctcacttaaG | 312 |
| F9-E240D-For | gtcaactggattaagGACaaaacaaagctcacttaaG | 313 |
| F9-N178D-For | CAaagttcaccatctatGACaacatgttctgtgctggc | 314 |
| F9-N178Y-For | CAaagttcaccatctatTACaacatgttctgtgctggc | 315 |
| F9-Y177A-For | CTacaaagttcaccatcGCTaacaacatgttctgtGC | 316 |
| F9-Y177T-For | CTacaaagttcaccatcACCaacaacatgttctgtGC | 317 |
| F9-T175R-For | cttcgatctacaaagttcAGGatctataacaacatgttc | 318 |
| F9-T175E-For | cttcgatctacaaagttcGAAatctataacaacatgttc | 319 |
| F9-T175Q-For | cttcgatctacaaagttcCAGatctataacaacatgttc | 320 |
| F9-F174I-For | GTcttcgatctacaaagATCaccatctataacaacatg | 321 |
| F9-T175R/Y177T- | cgatctacaaagttcAGGatcACCaacaacatgttctgtG | 322 |
| For | | |
| F9-Y94F/K98T-For | GAattattcctcaccacaacTTCaatgcagctattaatACCta | 323 |
| | caaccatgacattG | |
| F9-F145N/K1485- | ggctggggaagagtcAACcacAGCgggagatcagotttaG | 324 |
| For | | |

[0542] Table 16, below, sets forth the FIX variants that were generated, with the mutations indicated using numbering relative to the mature FIX polypeptide set forth in SEQ ID NO:3, and also chymotrypsin numbering.

TABLE 16
FIX variants

| Mutation | Mutation | SEQ |
|---|---|---|
| (Mature FIX | (Chymotrypsin | ID |
| Numbering) | Numbering) | NO. |
| Catalyst Biosciences WT | Catalyst Biosciences WT | 3 |
| N157D | N[157]D | 75 |
| Y155F | Y[155]F | 76 |
| A103N/N105S | A[103]N/N[105]S | 77 |
| D104N/K106S | D[104]N/K[106]S | 78 |
| K106N/V108S | K[106]N/V[108]S | 79 |
| D85N | D[85]N | 80 |
| T148A | T[148]A | 81 |
| K5A | K[5]A | 82 |
| D64N | D[64]N | 83 |
| D64A | D[64]A | 84 |
| N167D | N[167]D | 85 |
| N167Q | N[167]Q | 86 |
| S61A | S[61]A | 87 |
| S53A | S[53]A | 88 |
| T159A | T[159]A | 89 |
| T169A | T[169]A | 90 |
| T172A | T[172]A | 91 |
| T179A | T[179]A | 92 |
| Y155H | Y[155]H | 93 |
| Y155Q | Y[155]Q | 94 |
| S158A | S[158]A | 95 |
| S158D | S[158]D | 96 |
| S158E | S[158]E | 97 |
| N157Q | N[157]Q | 98 |
| D203N/F205T | D39N/F41T | 99 |
| D85N/D203N/F205T | D[85]N/D39N/F41T | 100 |
| K228N | K63N | 101 |
| D85N/K228N | D[85]N/K63N | 102 |
| I251S | I86S | 103 |
| D85N/I251S | D[85]N/I86S | 104 |
| D85N/D104N/K106S/I251S | D[85]N/D[104]N/K[106]S/I86S | 105 |
| A262S | A95bS | 106 |
| K413N | K243N | 107 |
| E410N | E240N | 108 |
| E239N | E74N | 109 |
| T241N/H243S | T76N/H78S | 110 |
| K247N/N249S | K82N/N84S | 111 |
| L321N | L153N | 112 |
| F314N/H315S | F145N/H147S | 113 |
| K392N/K394S | K222N/K224S | 114 |
| S319N/L321S | S151N/L153S | 115 |
| N260S | N95S | 116 |
| Y284N | Y117N | 117 |
| G317N | G149N | 118 |
| R318N/A320S | R150N/A152S | 119 |
| R318A | R150A | 120 |
| R318E | R150E | 121 |
| R318Y | R150Y | 122 |
| R312Q | R143Q | 123 |
| R312A | R143A | 124 |
| R312Y | R143Y | 125 |
| R312L | R143L | 126 |
| V202M | V38M | 127 |
| V202Y | V38Y | 128 |
| D203M | D39M | 129 |
| D203Y | D39Y | 130 |
| A204M | A40M | 131 |
| A204Y | A40Y | 132 |
| K400A/R403A | K230A/R233A | 133 |
| K400E/R403E | K230E/R233E | 134 |
| R403A | R233A | 135 |
| R403E | R233E | 136 |
| K400A | K230A | 137 |
| K400E | K230E | 138 |
| K293E | K126E | 139 |
| K293A | K126A | 140 |
| R333A | R165A | 141 |
| R333E | R165E | 142 |
| R338A | R170A | 143 |
| R338E | R170E | 144 |
| R338A/R403A | R170A/R233A | 145 |
| R338E/R403E | R170E/R233E | 146 |
| K293A/R403A | K126A/R233A | 147 |
| K293E/R403E | K126E/R233E | 148 |
| K293A/R338A/R403A | K126A/R170A/R233A | 149 |
| K293E/R338E/R403E | K126E/R170E/R233E | 150 |
| R318A/R403A | R150A/R233A | 151 |
| R318E/R403E | R150E/R233E | 152 |
| R318Y/E410N | R150Y/E240N | 153 |
| R338E/E410N | R170E/E240N | 154 |
| R338E/R403E/E410N | R170E/R233E/E240N | 155 |
| R318Y/R338E/R403E | R150Y/R170E/R233E | 156 |
| D203N/F205T/K228N | D39N/F41T/K63N | 157 |
| D203N/F205T/E410N | D39N/F41T/E240N | 158 |
| D203N/F205T/R338E | D39N/F41T/R170E | 159 |
| D203N/F205T/R338A | D39N/F41T/R170A | 160 |
| D203N/F205T/R318Y | D39N/F41T/R150Y | 161 |
| D203N/F205T/R338E/R403E | D39N/F41T/R170E/R233E | 162 |
| K228N/E410N | K63N/E240N | 163 |
| K228N/R338E | K63N/R170E | 164 |
| K228N/R338A | K63N/R170A | 165 |
| K228N/R318Y | K63N/R150Y | 166 |
| K228N/R338E/R403E | K63N/R170E/R233E | 167 |
| R403E/E410N | R233E/E240N | 168 |
| R318Y/R338E/E410N | R150Y/R170E/E240N | 169 |
| K228N/R318Y/E410N | K63N/R150Y/E240N | 170 |
| R318Y/R403E/E410N | R150Y/R233E/E240N | 171 |
| R318Y/R338E/R403E/E410N | R150Y/R170E/R233E/E240N | 172 |
| D203N/F205T/R318Y/E410N | D39N/F41T/R150Y/E240N | 173 |
| R333S | R165S | 186 |
| R338L | R170L | 187 |
| K316N | K148N | 189 |
| K316A | K148A | 190 |
| K316E | K148E | 191 |
| K316S | K148S | 192 |
| K316M | K148M | 193 |
| E239S | E74S | 194 |
| E239A | E74A | 195 |
| E239R | E74R | 196 |
| E239K | E74K | 197 |
| H257F | H92F | 198 |
| H257Y | H92Y | 199 |
| H257E | H92E | 200 |
| H257S | H92S | 201 |
| T412A | T242A | 202 |
| T412V | T242V | 203 |
| E410N/T412A | E240N/T242A | 204 |
| E410N/T412V | E240N/T242V | 205 |
| E410Q | E240Q | 174 |
| E410S | E240S | 175 |
| E410A | E240A | 176 |
| E410D | E240D | 206 |
| N346D | N178D | 207 |
| N346Y | N178Y | 208 |
| F314N/K316S | F145N/K148S | 177 |
| A103N/N105S/K228N | A[103]N/N[105]S/K63N | 217 |
| D104N/K106S/K228N | D[104]N/K[106]S/K63N | 218 |
| K228N/I251S | K63N/I86S | 180 |
| A103N/N105S/I251S | A[103]N/N[105]S/I86S | 181 |
| D104N/K106S/I251S | D[104]N/K[106]S/I86S | 182 |
| A103N/N105S/R318Y/R338E/R403E/ | A[103]N/N[105]S/R150Y/R170E/ | 219 |
| E410N | R233E/E240N | |
| D104N/K106S/R318Y/R338E/R403E/ | D[104]N/K[106]S/R150Y/R170E/ | 220 |
| E410N | R233E/E240N | |
| K228N/R318Y/R338E/R403E/E410N | K63N/R150Y/R170E/R233E/E240N | 221 |
| I251S/R318Y/R338E/R403E/E410N | I86S/R150Y/R170E/R233E/E240N | 222 |
| D104N/K106S/I251S/R318Y/R338E/ | D[104]N/K[106]S/I86S/R150Y/ | 223 |
| R403E/E410N | R170E/R233E/E240N | |
| D104N/K106S/R318Y/E410N/R338E | D[104]N/K[106]S/R150Y/E240N/ | 224 |
| | R170E | |
| I251S/R318Y/E410N/R338E | I86S/R150Y/E240N/R170E | 225 |
| D104N/K106S/I251S/R318Y/R338E/ | D[104]N/K[106]S/I86S/R150Y/ | 226 |
| E410N/ | R170E/E240N | |
| A103N/N105S/K247N/N249S | A[103]N/N[105]S/K82N/N84S | 178 |
| D104N/K106S/K247N/N249S | D[104]N/K[106]S/K82N/N84S | 179 |
| K228N/K247N/N249S | K63N/K82N/N84S | 183 |
| A103N/N105S/Y155F | A[103]N/N[105]S/Y[155]F | 227 |
| D104N/K106S/Y155F | D[104]N/K[106]S/Y[155]F | 228 |
| Y155F/K228N | Y[155]F/K63N | 229 |
| Y155F/I251S | Y[155]F/I86S | 230 |
| Y155F/K247N/N249S | Y[155]F/K82N/N84S | 231 |
| A103N/N105S/K247N/N249S/R318Y/ | A[103]N/N[105]S/K82N/N84S/ | 232 |
| R338E/R403E/E410N | R150Y/R170E/R233E/E240N | |
| D104N/K106S/K247N/N249S/R318Y/ | D[104]N/K[106]S/K82N/N84S/ | 233 |
| R338E/R403E/E410N | R150Y/R170E/R233E/E240N | |
| K228N/K247N/N249S/R318Y/R338E/ | K63N/K82N/N84S/R150Y/R170E/ | 234 |
| R403E/E410N | R233E/E240N | |
| A103N/N105S/Y155F/R318Y/R338E/ | A[103]N/N[105]S/Y[155]F/R150Y/ | 235 |
| R403E/E410N | R170E/R233E/E240N | |
| D104N/K106S/Y155F/R318Y/R338E/ | D[104]N/K[106]S/Y[155]F/ | 236 |
| R403E/E410N | R150Y/R170E/R233E/E240N | |
| Y155F/K228N/R318Y/R338E/R403E/ | Y[155]F/K63N/R150Y/R170E/ | 237 |
| E410N | R233E/E240N | |
| Y155F/I251S/R318Y/R338E/R403E/ | Y[155]F/I86S//R150Y/R170E/ | 238 |
| E410N | R233E/E240N | |
| Y155F/K247N/N249S/R318Y/R338E/ | Y[155]F/K82N/N84S/R150Y/R170E/ | 239 |
| R403E/E410N | R233E/E240N | |
| K247N/N249S/R318Y/R338E/R403E/ | K82N/N84S/R150Y/R170E/R233E/ | 240 |
| E410N | E240N | |
| Y155F/R318Y/R338E/R403E/E410N | Y[155]F/R150Y/R170E/R233E/E240N | 241 |
| K247N/N249S/R318Y/R338E/E410N | K82N/N84S/R150Y/R170E/E240N | 242 |
| Y155F/R318Y/R338E/E410N | Y[155]F/R150Y/R170E/E240N | 243 |
| Y155F/K247N/N249S/R318Y/R338E/ | Y[155]F/K82N/N84S/R150Y/R170E/ | 244 |
| E410N | E240N | |
| D104N/K106S/YE55F/K228N/K247N/ | D[104]N/K[106]S/Y[155]F/ | 245 |
| N249S | K63N/K82N/N84S | |
| D104N/K106S/Y155F/K247N/N249S | D[104]N/K[106]S/Y[155]F/K82N/N84S | 246 |
| D104N/K106S/Y155F/K228N/ | D[104]N/K[106]S/Y[155]F/K63N | 247 |
| Y155F/K228N/K247N/N249S | Y[155]F/K63N/K82N/N84S | 248 |
| D104N/K106S/K228N/K247N/N249S | D[104]N/K[106]S/K63N/K82N/N84S | 184 |
| R318Y/R338E/R403E/E410S | R150Y/R170E/R233E/E240S | 249 |
| R318Y/R338E/R403E/E410N/T412V | R150Y/R170E/R233E/E240N/T242V | 250 |
| R318Y/R338E/R403E/E410N/T412A | R150Y/R170E/R233E/E240N/T242A | 251 |
| R318Y/R338E/R403E/T412A | R150Y/R170E/R233E/T242A | 252 |
| R318Y/R338E/E410S | R150Y/R170E/E240S | 253 |
| R318Y/R338E/T412A | R150Y/R170E/T242A | 254 |
| R318Y/R338E/E410N/T412V | R150Y/R170E/E240N/T242V | 255 |
| D85N/K228N/R318Y/R338E/R403E/ | D[85]N/K63N/R150Y/R170E/R233E/ | 256 |
| E410N | E240N | |
| N260S/R318Y/R338E/R403E/E410N | N95S/R150Y/R170E/R233E/E240N | 257 |
| R318Y/R338E/N346D/R403E/E410N | R150Y/R170E/N178D/R233E/E240N | 258 |
| Y155F/N346D | Y[155]F/N178D | 259 |
| Y155F/R318Y/R338E/N346D/R403E/ | Y[155]F/R150Y/R170E/N178D/R233E/ | 260 |
| E410N | E240N | |
| Y155F/N260S/N346D/ | Y[155]F/N95S/N178D | 261 |
| K247N/N249S/N260S | K82N/N84S/N95S | 262 |
| D104N/K106S/N260S | D[104]N/K[106]S/N95S | 185 |
| Y155F/N260S | Y[155]F/N95S | 263 |
| K247N/N249S/N260S/R318Y/R338E/ | K82N/N84S/N95S/R150Y/R170E/R233E/E240N | 264 |
| R403E/E410N | | |
| D104N/K106S/N260S/R318Y/R338E/ | D[104]N/K[106]S/N95S/R150Y/ | 265 |
| R403E/E410N | R170E/R233E/E240N | |
| Y155F/N260S/R318Y/R338E/R403E/ | Y[155]F/N95S/R150Y/R170E/R233E/ | 266 |
| E410N | E240N | |
| R318Y/R338E/T343R/R403E/E410N | R150Y/R170E/T175R/R233E/E240N | 267 |
| R338E/T343R | R170E/T175R | 268 |
| D104N/K106S/Y155F/N260S | D[104]N/K[106]S/Y[155]F/N95S | 269 |
| Y155F/K247N/N249S/N260S | Y[155]F/K82N/N84S/N95S | 270 |
| D104N/K106S/K247N/N249S/N260S | D[104]N/K[106]S/K82N/N84S/N95S | 271 |
| D104N/K106S/Y155F/K247N/N249S/ | D[104]N/K[106]S/Y[155]F/ | 272 |
| N260S | K82N/N84S/N95S | |
| Y345A | Y177A | 213 |
| Y345T | Y177T | 214 |
| T343R | T175R | 209 |
| T343E | T175E | 210 |
| T343Q | T175Q | 211 |
| F342I | F174I | 212 |
| T343R/Y345T | T175R/Y177T | 215 |
| R318Y/R338E | R150Y/R170E | 188 |
| Y259F/K265T/Y345T | Y94F/K98T/Y177T | 216 |
| D104N/K106S/Y155F/K247N/N249S/ | D[104]N/K[106]S/Y[155]F/ | 326 |
| R318Y/R338E/R403E/E410N | K82N/N84S/R150Y/R170E/R233E/E240N | |
| D104N/K106S/K228N/K247N/N249S/ | D[104]N/K[106]S/K63N/K82N/ | 327 |
| R318Y/R338E/R403E/E410N | N84S/R150Y/R170E/R233E/E240N | |
| Y155F/K228N/K247N/N249S/R318Y/ | Y[155]F/K63N/K82N/N84S/R150Y/ | 328 |
| R338E/R403E/E410N | R170E/R233E/E240N | |
| Y155F/K247N/N249S/N260S/R318Y/ | Y[155]F/K82N/N84S/N95S/R150Y/ | 329 |
| R338E/R403E/E410N | R170E/R233E/E240N | |
| Y155F/R318Y/R338E/T343R/R403E/ | Y[155]F/R150Y/R170E/T175R/R233E/ | 330 |
| E410N | E240N | |
| D104N/K106S/R318Y/R338E/T343R/ | D[104]N/K[106]S/R150Y/ | 331 |
| R403E/E410N | R170E/T175R/R233E/E240N | |
| T343R/N346Y | T175R/N178Y | 332 |
| R318Y/R338E/N346Y/R403E/E410N | R150Y/R170E/N178Y/R233E/E240N | 333 |
| R318Y/R338E/T343R/N346Y/R403E/ | R150Y/R170E/T175R/N178Y/R233E/E240N | 334 |
| E410N | | |
| T343R/N346D | T175R/N178D | 335 |
| R318Y/R338E/T343R/N346D/R403E/ | R150Y/R170E/T175R/N178D/R233E/E240N | 336 |
| E410N | | |
| R318Y/R338E/Y345A/R403E/E410N | R150Y/R170E/Y177A/R233E/E240N | 337 |
| R318Y/R338E/Y345A/N346D/R403E/ | R150Y/R170E/Y177A/N178D/R233E/E240N | 338 |
| E410N | | |
| Y155F/K247N/N249S/R318Y/R338E/ | Y[155]F/K82N/N84S/R150Y/R170E/ | 339 |
| R403E | R233E | |
| K247N/N249S/R318Y/R338E/R403E | K82N/N84S/R150Y/R170E/R233E | 340 |
| Y155F/K247N/N249S/R318Y/R403E/ | Y[155]F/K82N/N84S/R150Y/R233E/ | 341 |
| E410N | E240N | |
| K247N/N249S/R318Y/R403E/E410N | K82N/N84S/R150Y/R233E/E240N | 342 |
| Y155F/K247N/N249S/R338E/R403E/ | Y[155]F/K82N/N84S/R170E/R233E/ | 343 |
| E410N | E240N | |
| K247N/N249S/R338E/R403E/E410N | K82N/N84S/R170E/R233E/E240N | 344 |
| R318Y/R338E/T343R/R403E | R150Y/R170E/T175R/R233E | 345 |
| Y155F/R318Y/R338E/T343R/R403E | Y[155]F/R150Y/R170E/T175R/R233E | 346 |
| R318Y/R338E/T343R/E410N | R150Y/R170E/T175R/E240N | 347 |
| Y155F/R318Y/R338E/T343R/E410N | Y[155]F/R150Y/R170E/T175R/E240N | 348 |
| R318Y/T343R/R403E/E410N | R150Y/T175R/R233E/E240N | 349 |
| Y155F/R318Y/T343R/R403E/E410N | Y[155]F/R150Y/T175R/R233E/E240N | 350 |
| R338E/T343R/R403E/E410N | R170E/T175R/R233E/E240N | 351 |
| Y155F/R338E/T343R/R403E/E410N | Y[155]F/R170E/T175R/R233E/E240N | 352 |
| Y155F/K247N/N249S/R318Y/R338E/ | Y[155]F/K82N/N84S/R150Y/R170E/ | 353 |
| T343R/R403E/E410N | T175R/R233E/E240N | |
| K247N/N249S/R318Y/R338E/T343R/ | K82N/N84S/R150Y/R170E/T175R/R233E/ | 354 |
| R403E/E410N | E240N | |
| K228N/I251S/R318Y/R338E/R403E/ | K63N/I86S/R150Y/R170E/R233E/E240N | 355 |
| E410N | | |
| Y155F/K228N/I251S/R318Y/R338E/ | Y[155]F/K63N/I86S/R150Y/R170E/ | 356 |
| R403E/E410N | R233E/E240N | |
| N260S/R318Y/R338E/T343R/R403E/ | N95S/R150Y/R170E/T175R/R233E/E240N | 357 |
| E410N | | |
| Y155F/N260S/R318Y/R338E/T343R/ | Y[155]F/N95S/R150Y/R170E/T175R/ | 358 |
| R403E/E410N | R233E/E240N | |
| K228N/K247N/N249S/R318Y/R338E/ | K63N/K82N/N84S/R150Y/R170E/T175R/ | 359 |
| T343R/R403E/E410N | R233E/E240N | |
| Y155F/K228N/K247N/N249S/R318Y/ | Y[155]F/K63N/K82N/N84S/R150Y/ | 360 |
| R338E/T343R/R403E/E410N | R170E/T175R/R233E/E240N | |
| Y155F/R338E/T343R/R403E | Y[155]F/R170E/T175R/R233E | 361 |
| R338E/T343R/R403E | R170E/T175R/R233E | 362 |
| Y155F/R338E/T343R/R403E/E410S | Y[155]F/R170E/T175R/R233E/E240S | 363 |
| Y155F/N260S/R338E/T343R/R403E | Y[155]F/N95S/R170E/T175R/R233E | 364 |
| Y155F/I251S/R338E/T343R/R403E | Y[155]F/I86S/R170E/T175R/R233E | 365 |
| R318Y/R338E/T343R/R403E/E410S | R150Y/R170E/T175R/R233E/E240S | 366 |
| Y155F/K247N/N249S/T343R/R403E | Y[155]F/K82N/N84S/T175R/R233E | 367 |
| Y155F/K247N/N249S/R318Y/R338E/ | Y[155]F/K82N/N84S/R150Y/R170E/ | 368 |
| T343R/R403E | T175R/R233E | |
| K247N/N249S/R318Y/R338E/T343R/ | K82N/N84S/R150Y/R170E/T175R/R233E | 369 |
| R403E | | |
| Y155F/K247N/N249S/R338E/T343R/ | Y[155]F/K82N/N84S/R170E/T175R/ | 370 |
| R403E/E410N | R233E/E240N | |
| K247N/N249S/R338E/T343R/R403E/ | K82N/N84S/R170E/T175R/R233E/E240N | 371 |
| E410N | | |
| Y155F/K247N/N249S/R318Y/R338E | Y[155]F/K82N/N84S/R150Y/R170E | 372 |
| Y155F/K247N/N249S/R318Y/T343R | Y[155]F/K82N/N84S/R150Y/T175R | 373 |
| Y155F/K247N/N249S/R318Y/R403E | Y[155]F/K82N/N84S/R150Y/R233E | 374 |
| Y155F/K247N/N249S/R318Y/E410N | Y[155]F/K82N/N84S/R150Y/E240N | 375 |
| Y155F/K247N/N249S/R338E/R403E | Y[155]F/K82N/N84S/R170E/R233E | 376 |
| Y155F/K247N/N249S/R338E/T343R | Y[155]F/K82N/N84S/R170E/T175R | 377 |
| Y155F/K247N/N249S/R318Y/R338E/ | Y[155]F/K82N/N84S/R150Y/R170E/ | 378 |
| T343R/E410N | T175R/E240N | |
| K247N/N249S/R318Y/R338E/T343R/ | K82N/N84S/R150Y/R170E/T175R/E240N | 379 |
| E410N | | |
| Y155F/K247N/N249S/R318Y/T343R/ | Y[155]F/K82N/N84S/R150Y/T175R/ | 380 |
| R403E/E410N | R233E/E240N | |
| K247N/N249S/R318Y/T343R/R403E/ | K82N/N84S/R150Y/T175R/R233E/E240N | 381 |
| E410N | | |
| Y155F/K247N/N249S/R338E/E410N | Y[155]F/K82N/N84S/R170E/E240N | 382 |
| Y155F/K247N/N249S/R318Y/T343R/ | Y[155]F/K82N/N84S/R150Y/T175R/ | 383 |
| R403E | R233E | |
| K247N/N249S/R318Y/T343R/R403E | K82N/N84S/R150Y/T175R/R233E | 384 |
| Y155F/K247N/N249S/R318Y/T343R/ | Y[155]F/K82N/N84S/R150Y/T175R/ | 385 |
| E410N | E240N | |
| K247N/N249S/R318Y/T343R/E410N | K82N/N84S/R150Y/T175R/E240N | 386 |
| Y155F/K247N/N249S/R338E/T343R/ | Y[155]F/K82N/N84S/R170E/T175R/ | 387 |
| R403E | R233E | |
| K247N/N249S/R338E/T343R/R403E | K82N/N84S/R170E/T175R/R233E | 388 |
| Y155F/K247N/N249S/R338E/T343R/ | Y[155]F/K82N/N84S/R170E/T175R/ | 389 |
| E410N | E240N | |
| K247N/N249S/R338E/T343R/E410N | K82N/N84S/R170E/T175R/E240N | 390 |
| Y155F/K247N/N249S/T343R/R403E/ | Y[155]F/K82N/N84S/T175R/R233E/ | 391 |
| E410N | E240N | |
| K247N/N249S/T343R/R403E/E410N | K82N/N84S/T175R/R233E/E240N | 392 |
| Y155F/R318Y/R338E/T343R | Y[155]F/R150Y/R170E/T175R | 393 |
| R318Y/R338E/T343R | R150Y/R170E/T175R | 394 |
| Y155F/R318Y/T343R/R403E | Y[155]F/R150Y/T175R/R233E | 395 |
| Y155F/T343R/R403E/E410N | Y[155]F/T175R/R233E/E240N | 396 |
| Y155F/K247N/N249S/R318Y/R338E/ | Y[155]F/K82N/N84S/R150Y/R170E/ | 397 |
| T343R | T175R | |
| K247N/N249S/R318Y/R338E/T343R | K82N/N84S/R150Y/R170E/T175R | 398 |
| Y155F/K247N/N249S/T343R/E410N | Y[155]F/K82N/N84S/T175R/E240N | 399 |
| Y155F/K247N/N249S/R403E/E410N | Y[155]F/K82N/N84S/R233E/E240N | 400 |
| Y155F/R338E/T343R/E410N | Y[155]F/R170E/T175R/E240N | 401 |
| R338E/T343R/E410N | R170E/T175R/E240N | 402 |
| Y155F/R318Y/T343R/E410N | Y[155]F/R150Y/T175R/E240N | 403 |
| R318Y/T343R/E410N | R150Y/T175R/E240N | 404 |
| K228N/R318Y/R338E/T343R/R403E/ | K63N/R150Y/R170E/T175R/R233E/E240N | 405 |
| E410N | | |
| K228N/K247N/N249S/R318Y/R338E/ | K63N/K82N/N84S/R150Y/R170E/T175R/ | 406 |
| T343R/R403E | R233E | |
| K228N/K247N/N249S/R318Y/R338E/ | K63N/K82N/N84S/R150Y/R170E/T175R/ | 407 |
| T343R/E410N | E240N | |
| K228N/K247N/N249S/R318Y/T343R/ | K63N/K82N/N84S/R150Y/T175R/R233E/ | 408 |
| R403E/E410N | E240N | |
| Y155F/R338E/R403E/E410N | Y[155]F/R170E/R233E/E240N | 409 |
| Y155F/R318Y/R338E/R403E | Y[155]F/R150Y/R170E/R233E | 410 |
| Y155F/R318Y/R403E/E410N | Y[155]F/R150Y/R233E/E240N | 411 |
| Y1N | Y[1]N | 412 |

### C. Expression and Purification of FIX Polypeptides

[0543] Wild-type and variant FIX polypeptides were expressed in CHO-Express (CHOX) cells (Excellgene). CHO Express (CHOX) cells were maintained in DM204B Complete medium (Irvine Scientific) and used to inoculate production seed cultures. Seed cultures were grown in the same media to approximately 1.4×10⁷ viable cells (vc)/mL and approximately 100 mL used to inoculate approximately 1.0 L of DM204B Complete media, so that the inoculation density was 1.2×10⁶ vc/mL. This culture was grown for 3 days to reach 13-16×10⁶ vc/mL on the day of transfection. A transfection complex was formed by mixing FIX plasmid DNA (3.2 mg) with Polyethylenimine “MAX” (PEI—20.5 mg (Polysciences)) and diluting to 1.0 L with serum-free TfMAX2 transfection medium (Mediatech). This mixture was then added to the 1.0 L production culture. 1.0 L aliquots of the cells plus transfection mix were split into 2×3 L baffled Fernback Flasks and allowed to express for 4 days before harvesting the crude FIX. Culture supernatants were then harvested by filtration and FIX was purified.

[0544] Larger-scale cultures of 10 L or greater were produced in WAVE bioreactors (GE Healthcare). 20 L wave bags were inoculated with approximately 400 mL of seed culture, grown as described above, with 4.6 L of DM204B Complete media to a seeding density of 1.2×10⁶ vc/mL. The WAVE bioreactor was set to a rocking angle of 6 degrees, rocking rate of 24 rpm at 37.1° C. in order to allow the cells to reach a cell density of 13-16×10⁶ vc/mL 3 days later. 16 mg of FIX plasmid DNA and 102.5 mg of PEI were combined to form a transfection complex, which was diluted in 5.0 L of TfMAX2 prior to addition to the culture on the WAVE bioreactor, 3 days after the initial seeding. While the Transfection complex plus TfMAX media was added to the wave bag, the rocking angle of the WAVE Bioreactor was set to 8 degrees and the temperature to 33° C., while the other settings remained the same. The culture was allowed to express for 4 days before harvesting the crude FIX. The contents of the wave bags were allowed to settle for 3 hrs at 4° C. prior to harvesting the culture supernatant through a CUNO depth filter and then the FIX was purified. FIX polypeptides were purified using a Capto Q column (GE Healthcare), to which FIX polypeptides with functional Gla domains adsorb, followed by a calcium elution step. Typically, EDTA (10 mM), Tris (25 mM, pH 8.0), and Tween-80 (0.001%) were added to the culture supernatant from the transfected cells. The samples were loaded onto a Capto Q column that had been pre-equilibrated with Buffer B (25 mM Tris pH 8, 1 M NaCl, 0.001% Tween-80), followed by equilibration with Buffer A (25 mM Tris pH 8, 0.15 M NaCl, 0.001% Tween-80). Immediately following completion of sample loading, the column was washed with 14% Buffer B (86% Buffer A) for 20 column volumes. Buffer C (25 mM Tris pH 8, 0.2 M NaCl, 0.001% Tween-80, 10 mM CaCl₂)) was then applied to the column to elute the FIX polypeptides that were collected as a pool.

[0545] The eluted pool was further purified using a Q Sepharose HP column (GE Healthcare). The sample was prepared for application by diluting with 2 volumes of Buffer D (25 mM Tris pH 8, 0.001% Tween-80). The diluted sample was loaded onto a Q Sepharose HP column that had been pre-equilibrated with Buffer F (25 mM Tris pH 8, 1 M NaCl, 2.5 mM CaCl₂), 0.001% Tween-80), followed by Buffer E (25 mM Tris pH 8, 2.5 mM CaCl₂), 0.001% Tween-80). After washing with 4% Buffer F (96% Buffer E), a gradient from 4-40% Buffer F was applied to the column and fractions were collected. Fractions containing FIX polypeptides were then pooled.

### D. Purification to Enrich for Glycosylated Polypeptides

[0546] The extent of glycosylation of the modified FIX polypeptides was estimated using SDS-polyacrylamide gel electrophoresis. Hyperglycosylation was assessed by comparison of the migration pattern of the modified FIX polypeptide with a wild type FIX, Benefix® Coagulation FIX. Hyperglycosylated forms of the enzyme migrated slower, exhibiting a higher apparent molecular weight, than the wild type polypeptide. It was observed that the polypeptides containing the E240N mutation, which introduces a non-native N-glycosylation site at position 240, were only partially glycosylated (approximately 20% glycosylation). To enrich for the hyperglycosylated form, a modification of the purification process described above was performed.

[0547] The first step of purification was performed using the Capto Q column, as described above. The eluted pool from this column was diluted with 2 volumes of Buffer D (as above) and the sample was loaded onto a Heparin Sepharose column that had been pre-equilibrated with Buffer F (as above), followed by Buffer E (as above). The column was then developed with a gradient from 0% to 70% Buffer F and fractions were collected. The hyperglycosylated form of the E410N variant eluted from the column in approximately 35% Buffer F, whereas the non-hyperglycosylated form eluted in approximately 50% Buffer F. Each collected pool was further purified on the Q Sepharose HP column as described above. By this method a pool containing approximately 80% hyperglycosylated form of the E410N variant was obtained. The extent of hyperglycosylation was estimated by visual inspection of SDS-polyacrylamide gel electrophoresis.

### E. Exemplary Modified FIX

[0548] An exemplary modified FIX polypeptide is that which contains the replacements R318Y/R338E/T343R (SEQ ID NO:394; referred to herein as CB2679d, and also, as ISU304 in the Examples below). It is a purified modified recombinant form of the human factor IX protein modified with three point mutations that is produced in Chinese Hamster Ovary (CHO) cells. FIX of SEQ ID NO:394, with the replacements R318Y/R338E/T343R, is a 415 amino acid glycoprotein. The primary amino acid sequence of CB 2679d, illustrated in FIG. 4 (and SEQ ID NO:394), where the mature protein has 415 amino acids and varies from natural functional human FIX by the introduction of 3 point mutations into 2 distinct, solvent exposed surface loops of the FIX protein. This variant has three mutations: R318Y/R338E/T343R. These mutations confer enhanced procoagulant activity and reduced elimination. FIG. 5 illustrates that structure and domains of the mature form of FIX that has three mutations: R318Y/R338E/T343R. Other modified FIX polypeptides, such as the FIX polypeptide contain R338E/T343R, which optionally can be PEGylated or albuminated or otherwise modified to increase serum half-life, described and provided herein that have enhanced activity and optionally increased serum half-life also can be used for prophylactic subcutaneous administration.

[0549] The modified FIX proteins can be provided, for example, as a lyophilized powder in vials containing approximately 8475 IU/mL presented in 1.4 mL/vial (total 11865 IU/vial) when reconstituted with sterile water for injection (SWFI). A smaller dosage size can be provided to facilitate treatment of infants and very young toddlers.

[0550] Structure-based rational design was used to endow the modified polypeptides provided herein with significantly enhanced procoagulant activity and increased duration of action compared with plasma-derived or recombinant, wild type FIX (WT-FIX) (e.g., FIX sold as BeneFIX®, Rixubis®, Refixia® (the brand name for nonacog beta pegol(N9-GP)), and recombinant extended half-life (EHL) Fc fusion protein FIX (e.g., Alprolix® FIX). The enhanced properties of the modified FIX of SEQ ID NO:394 result from the introduction of the three amino acid replacements: arginine (R) 318 replaced by tyrosine (Y)/arginine (R) 338 replaced with glutamic acid (E)/threonine (T) 343 replace by arginine (R). One mutation is located in the “150-loop,” also referred to as the “autolysis loop,” and two mutations are in the “170-loop.” The mutations in the “170-loop” act synergistically to significantly enhance the affinity of the protein for its co-factor FVIII, and may also stabilize the active conformation of FIXa. The mutation in the “150-loop” also stabilizes the active conformation of the FIXa structure and can interact directly with the substrate FX and the primary inhibitor anti-thrombin III (ATIII). Consequently, these mutations increase the procoagulant, catalytic efficiency of the FIX variant by a plurality of mechanisms, and also provide resistance to physiologically relevant inhibition and elimination. Other modified FIX provided herein that have enhanced activity (at least 7-10 fold compared to wild-type FIX) and optionally longer serum half-life or duration of action can be used in the methods and regimens herein. For example, a modified FIX with the replacements R338E/T343R and serum stability or half-life extender, such as by Fc fusion, albumination, PEGylation and other such modifications can be used in the methods herein.

[0551] Due to these molecular alterations of its three-dimensional structure, compared with wild type FIX, the modified FIX of SEQ ID NO:394, with the replacements R318Y/R338E/T343R, exhibits in vitro approximately 3-fold enhanced catalytic efficiency for the activation of FX, 10-fold enhanced affinity for FVIIIa, and 15-fold resistance to inhibition by ATIII (Table 17 below and FIG. 6). These improved properties of CB 2679d were expected at the bleeding site to selectively accelerate the generation of the procoagulant activity (i.e., via FXa), and to increase the level and duration of its activity.

TABLE 17
Improved properties of FIX of SEQ ID NO: 394,
with the replacements R318Y/R338E/T343R

| | | Fold |
|---|---|---|
| | | Change |
| In Vitro | Pro-coagulant Activity | 2.8 |
| Assays | Affinity for FVIIIa | 10 |
| | Resistance to ATIII | 15 |
| In Vivo | aPTT reduction | 17 |
| Activity | Tail Clip Model | 20 |
| | Duration of aPTT Activity | 8 |

[0552] These properties were confirmed in vivo (see, e.g., FIG. 6); this modified FIX polypeptide displays 20-fold enhanced potency for inhibition of bleeding in a standard murine hemophilia tail cut model, a 17-fold reduction in (activated partial thromboplastin time) aPTT, and an 8-fold prolonged correction of aPTT activity compared with BeneFIX® FIX. Similar increased potency advantages of CB 2679d versus all commercially available FIX products are expected in man. In addition, significant improvements in duration of action versus BeneFIX® FIX, plasma-derived FIX (pdFIX), and other wild-type FIX products are expected when dosing is of equal mass/kg.

[0553] Activity Measurement

[0554] Function was measured in vitro using the one-stage clotting activity assay, which is one of the standardized tests for assessing the therapeutic potency of commercial factor IX preparations. WHO International Standard 4th International Standard for FIX Concentrate (NIBSC code 07/182) was used as a reference of Factor IX activity. Consistent with its greater potency in animal models, the specific activity of FIX of SEQ ID NO:394, with the replacements R318Y/R338E/T343R, in this assay is significantly higher (on average, 19-fold) than that of BeneFIX® FIX (see Table 18, below). The chromogenic assay also is used to measure potency and clinical activity in blood specimens (Table 19, below).

[0555] The one-stage clotting activity assay was performed using 3 batches of CB 2679d/ISU304 (batches B1528, B1531 and B1602Y); the average specific activity obtained from these 3 batches was compared with the specific activity of BeneFIX® FIX (batch J67791, a commercially available batch of BeneFIX® FIX). A standard curve was established using WHO standard in 1% BSA in TBS (pH 7.4).

TABLE 18
Specific Activity of the modified FIX of SEQ ID NO:
394 and BeneFIX ® Measured by One-Stage Clotting
Activity Assays Employing Different Type of Activators.

| | | FIX - SEQ ID | |
|---|---|---|---|
| | BeneFIX ® | NO: 394 (IU/mg) | Ratio of FIX of |
| | (IU/mg) | (B1528, B1531, | SEQ ID NO: 394 |
| Activator | (J67791) | B1602Y) | to BeneFIX ® |
| Stago PTT A | 262 | 5,705 | 22 |
| Pathromtin SL | 220 | 3,091 | 14 |
| Actin FS | 228 | 4,087 | 18 |
| C.K Prest^{†} | 257 | 5,101 | 20 |
| Mean ± SD | 242 ± 21 | 4,496 ± 1,150 | 19 |

^{†}C.K. Prest activator was employed in the release test of the modified FIX herein.

The modified FIX and BeneFIX® FIX potency were compared by clotting and Chromogenic assays (see Table 19, below).

TABLE 19
Summary of potency measurement by clotting and chromogenic assay

| | | | | Ratio of | | Ratio of |
|---|---|---|---|---|---|---|
| | | | Potency by | FIX of | | FIX of |
| | | | Clotting | SEQ ID | Potency by | SEQ ID |
| | | | assay, | NO: 394 to | Chromogenic | NO: 394 to |
| Name | Batch | mg/mL | IU/mg | BeneFIX ® | Assay, IU/mg | BeneFIX ® |
| BeneFIX ® | J67791 | 1.48 | 287 | — | 213 | — |
| FIX of SEQ | B1528 | 1.64 | 5,339 | 19 | 3.207 | 15 |
| ID NO: 394 | | | | | | |
| FIX of SEQ | E1601Y | 1.95 | 4,622 | 16 | 2.972 | 14 |
| ID NO: 394 | | | | | | |

[0556] These data show that the instantly provided modified FIX polypeptide is at least 14-fold more potent than BeneFIX® FIX in activity assays, with slightly lower activity when measured by chromogenic assay. A difference between one-stage clotting assay activity and chromogenic activity is commonly reported with modified recombinant FIX products. The variability of activity by varying activators is likewise well known. Thus, as described the instant polypeptides that contain the mutations R318Y/R338E/T343R have considerably enhanced potency compared to WT-FIX.

[0557] Functional Characterization the Modified FIX Polypeptides

[0558] Functional properties have been evaluated in a series of in vitro studies. The activation rate of the polypeptide of SEQ ID NO:394 (CB 2679d) by Factor XIa/calcium and the extent of activation (approximately 100%) were equivalent to those of commercial lots of BeneFIX® FIX. In contrast, the catalytic properties of fully activated CB 2679d under a variety of experimental conditions were improved compared with commercial lots of recombinant Factor IX preparations (EPAR), and native amino-acid sequence manufactured in the Sponsor's laboratory, referred to as ‘WT-recombinant’. The ability of activated FIX to bind to procoagulant phospholipid vesicles and activate factor X was improved over BeneFIX® FIX. Activated CB 2679d (FIX of SEQ ID NO:394) has a reduced rate of inhibition by antithrombin III (see Table 21 below). These improved properties mediate the significantly enhanced procoagulant potency of CB 2679d, as indicated by its specific activity of 3,091-5,705 IU/mg, compared with the reported and observed range of 220 to 262 IU/mg for BeneFIX® FIX.

[0559] The catalytic properties of fully activated CB 2679d under a variety of experimental conditions are improved compared with competing recombinant forms. The activated preparation of variant FIX (FIX of SEQ ID NO:394; CB 2679d) catalyzes the proteolytic cleavage and activation of purified factor X to the same extent in the presence of (1) poly-L-lysine phospholipid/calcium, and (3) factor VIIIa/phospholipid/calcium.

TABLE 20
Kinetic Analysis of FX Activation

| | Cofactor-Dependent | Fold Increase |
|---|---|---|
| | Indirect kcat/KM | over BeneFIX ® |
| Variant | (M-1s-1) | FIX |
| BeneFIX ® FIX | 4.3E+07 | 1 |
| WT-recombinant | 4.6E+07 | 1.1 |
| FIX of SEQ ID NO: 394 | 1.2E+08 | 2.8 |

[0560] The modified FIX provided herein has 2.8-fold higher cofactor dependent activity than BeneFIX® FIX (see Table 20).

TABLE 21
ATIII Inhibition of FIXa variants

| | ATIII Kapp | Fold |
|---|---|---|
| Variant | (M-1s-1) | decrease |
| BeneFIX ® FIX | 1.6E+07 | 1.4 |
| WT-recombinant | 2.4E+07 | 1 |
| FIX of SEQ ID NO: 394 | 1.1E+06 | 21.8 |

[0561] The modified FIX of SEQ ID NO:394 herein has ˜16-fold higher resistance to ATIII than BeneFIX® FIX.

[0562] The modified FIX (FIX of SEQ ID NO:394; CB 2679d/ISU304) has a high affinity to FVIIIa. In a situation where FVIIIa is absent (e.g., in the circulation), it is no longer active until FVIIIa is generated, so a prothrombotic risk is not present. Data presented in Table 22 below illustrate the effect of FVIIIa on the FIX of SEQ ID NO:394 (CB 2679d/ISU304) and BeneFIX® FIX. In the absence of FVIIIa, CB 2679d/ISU304 is 1.3-1.4-fold more active than BeneFIX® FIX; but its activity increases up to 486-fold when FVIIIa was added, while BeneFIX® FIX activity increases only up to 239-fold.

TABLE 22
Effect of FVIIIa concentration on FIX activity.

| | Test # | | | | | | | | |
|---|---|---|---|---|---|---|---|---|---|
| | 1 | | | 2 | | | 3 | | |
| | | | Fold- | | | Fold- | | | Fold- |
| | | | increase | | | increase | | | increase |
| | | | after | | | after | | | after |
| FVIIIa | | | FVIIIa | | | FVIIIa | | | FVIIIa |
| (ng/mL) | 0 | 5 | addition | 0 | 10 | addition | 0 | 15 | addition |
| CB2679d | | | | | | | | | |
| Mean | 1.24 | 278 | 225 | 1.25 | 479 | 384 | 1.28 | 622 | 486 |
| SD | 0.01 | 15 | | 0.00 | 28 | | 0.01 | 16 | |
| BeneFIX ® | | | | | | | | | |
| FIX | | | | | | | | | |
| Mean | 0.95 | 142 | 115 | 0.88 | 235 | 188 | 1.01 | 308 | 239 |
| SD | 0.01 | 9 | | 0.01 | 14 | | 0.00 | 3 | |
| Ratio | 1.3 | 2.0 | | 1.4 | 2.0 | | 1.3 | 2.0 | |
| (CB2679d vs | | | | | | | | | |
| BeneFIX ® | | | | | | | | | |
| FIX) | | | | | | | | | |

Measured in the presence of phospholipid vesicles (75% phosphatidyl-choline:25% phosphatidyl-serine).

[0563] Hemostatic activity was compared to the plasma-derived and recombinant products in a series of experiments that measured the thrombin generation potential of the preparations. The modified FIX provided herein shortens thrombin generation lag time and increases the amount of thrombin formed beyond that observed for BeneFIX® FIX. This indicates that its thrombogenic potential is greater than that of BeneFIX® FIX in individuals with hemophilia.

[0564] Hence, these results show that the catalytic properties, thrombin generation potential and hemostatic properties of modified FIX polypeptides provided herein are improved compared to those of recombinant and plasma-derived Factor IX products. These effects and resulting increased potency, unlike other available FIX products, renders such modified FIX polypeptides advantageous for gene therapy to provide sufficient FIX activity to effect prophylactic treatment of hemophilia such that treated subjects have normal or near normal clotting activity.

### Example 2

### Activation of FX and Determination of the Catalytically Active Protease (FXa) Concentration Using the Active Site Titrant Fluorescein-Mono-p′-Guanidinobenzoate (FMGB)

[0565] The concentration of Factor X (FX) in a stock of FX that can become catalytically active was determined. This stock of FX was then used in subsequent studies to calculate the catalytic activity of FIX variants for FX. Following activation of FX to FXa, the active site titration assay was carried out essentially as described by Bock et al. (Archives of Biochemistry and Biophysics (1989) 273:375-388) using the fluorogenic ester substrate fluorescein-mono-p′-guanidinobenzoate (FMGB), with a few minor modifications. FMGB readily reacts with FXa, but not FX or inactive protease, to form an effectively stable acyl-enzyme intermediate under conditions in which the concentration of FMGB is saturating and deacylation is especially slow and rate limiting for catalysis. Under these conditions, the FXa protease undergoes a single catalytic turnover to release the fluorescein fluorophore. When the initial burst of fluorescence is calibrated to an external concentration standard curve of fluorescein fluorescence, the concentration of active sites can be calculated.

### A. Activation of FX to FXa

[0566] The concentration of FX in a stock solution that is able to become catalytically active was determined by activation of FX samples with Russell's Viper Venom, followed by titrating the active FX (FXa) with FMGB. FX zymogen stocks were first pre-treated by the supplier with DFP (diisopropylfluorophosphate) and EGR-cmk to reduce the background FXa activity. FXa activation reactions were prepared with a final concentration of 10 μM FX (based on the A₂₈₀ absorbance and an extinction coefficient of 1.16) in a final volume of 50-100 μL in a reaction buffer containing 100 mM Tris, 50 mM NaCl, 5 mM CaCl₂), 0.1% PEG 8000, pH 8.1. Activation was initiated by the addition of Russell's Viper Venom (RVV-Xase; Heamatologic Technologies, Inc.) to a final concentration of 5 μg/mL (5 μL of a 98 μg/mL dilution per 100 μL reaction or 2.5 μL per 50 μL reaction) at 37° C. for 45-60 min of activation time (previously determined to represent complete activation by collecting samples every 15 min and testing the increase in cleavage of Spectrafluor FXa fluorogenic substrate). Reactions were quenched with 1/10 volume of quench buffer containing 100 mM Tris, 50 mM NaCl, 5 mM, 100 mM EDTA, 0.1% PEG 8000, pH 8.1.

### B. Active Site Titration

[0567] The active site titration assays were performed with a 1 mL reaction volume in a 0.4 cm×1 cm quartz cuvette under continuous stirring. Reactions contained 100-400 nM of the freshly activated FXa and 5 μM FMGB in an assay buffer containing 30 mM Hepes, 135 mM NaCl, 1 mM EDTA and 0.1% PEG 8000, pH 7.4. FMGB was prepared at a stock concentration of 0.01 M in DMF based on the dry weight and the concentration confirmed by absorbance spectroscopy at 452 nm using an extinction coefficient of 19,498 M⁻¹ cm⁻¹ in Phosphate Buffered Saline (PBS), pH 7.2. Assays were initiated by adding 5 μL of 1 mM FMGB (5 μM final concentration) to 1 mL of 1× assay buffer and first measuring the background hydrolysis of FMGB for ˜150-200 seconds before the addition of FXa to a final concentration of ˜100-400 nM. The release of fluorescein fluorescence in the burst phase of the reaction was followed for an additional 3600 seconds.

[0568] The amount of fluorescein released following catalysis of FMGB by FXa was determined using a standard curve of free fluorescein. The fluorescein standard solution was freshly prepared at a stock concentration of ˜70-150 mM in DMF and the accurate concentration was confirmed by absorbance spectroscopy under standard conditions at 496 nm using an extinction coefficient of 89,125 M⁻¹ cm⁻¹ in 0.1 N NaOH. A standard curve of free fluorescein was then prepared by titration of the absorbance-calibrated fluorescein standard into 1× assay buffer in 20 nM steps to a final concentration of 260-300 nM.

[0569] For data analysis, reaction traces were imported into the Graphpad Prism software package and the contribution of background hydrolysis was subtracted from the curve by extrapolation of the initial measured rate of spontaneous FMGB hydrolysis, which was typically less than 5% of the total fluorescence burst. The corrected curve was fit to a single exponential equation with a linear component (to account for the slow rate of deacylation) of the form ΔFluorescence=Amp(1−e^{-kt})+Bt, where Amp=the amplitude of the burst phase under the saturating assay conditions outline above, k is the observed first order rate constant for acyl-enzyme formation and B is a bulk rate constant associated with complete turnover of FMGB. The concentration of active FXa protease was calculated by comparison of the fit parameter for amplitude to the fluorescein standard curve. The values from multiple assays were measured, averaged and the standard deviation determined. The amount of active FXa in the preparation directly represents the concentration of FX in a stock preparation that can be activated by FIXa. This active site titrated value was employed when calculating the concentration of FX to be used in an indirect assay, such as the cofactor-dependent assay described in Example 4, below.

### Example 3

### Activation of FIX and Determination of the Catalytically Active Protease (FIXa) Concentration Using the Active Site Titrant 4-methylumbelliferyl p′-Guanidinobenzoate (MUGB)

[0570] The concentration of Factor IX (FIX) in a stock solution of the FIX zymogen that is able to become catalytically active was determined by activation of FIX samples, including FIX variants, with Factor XIa (FXIa; Heamatologic Technologies, Inc.) followed by titrating the active Factor IX (FIXa) with 4-methylumbelliferyl p′-guanidinobenzoate (MUGB).

### A. Activation of FIX to FIXa

[0571] Total protein concentrations in the FIX polypeptide preparations were determined by the A₂₈₀ absorbance using an extinction coefficient unique for each variant (i.e. ε₂₈₀=number of Tyr residues×1490+number Trp residues×5500+number Cys residues×125). Activation reactions of FIX to FIXa were prepared at a final concentration of 10 μM FIX in a final volume of 200-500 μL in a reaction buffer containing 100 mM Tris, 50 mM NaCl, 5 mM CaCl₂), 0.1% PEG 8000, pH 8.1. Activations were initiated by the addition of FXIa or biotinylated FXIa to a final concentration of 20 nM at 37° C. for 60 min of activation time. A 60 minute activation time was previously determined to represent complete activation by collecting samples every 15 min and assaying for total cleavage by SDS-PAGE.

[0572] The free FXIa or biotinylated FXIa used in the activation reaction was then removed from the samples using one of two methods that produce equivalent results, each removing greater than 95-97% of the catalytic FXIa. In the first method, which was used to remove free FXIa, activation reactions initiated with FXIa were mixed with an anti-FXIa monoclonal antibody (Abcam 20377) to a final concentration of 50 nM for 60 min at 37° C. Antibody capture of free FXIa was followed by the addition of washed protein G Dynal Beads (30 mg/mL; Invitrogen) to a final concentration of 25% vol:vol for an additional 120 min at room temperature. The Dynal Beads were removed from the solution per the manufacturer's instructions. In the second method, which was used to removed biotinylated FXIa, activation reactions using biotinylated FXIa were mixed with Streptavidin Dynal Beads (10 mg/mL; Invitrogen) to a final concentration of 10% vol:vol for 60 min at room temperature. The Dynal Beads were then removed per the manufacturer's instructions. Following removal of the FXIa, the total protein concentrations of activated FIXa samples were determined by A₂₈₀ absorbance using an extinction coefficient unique for each variant (as described above).

### B. Active Site Titration of FIXa

[0573] The concentration of catalytically active FIXa in an activated stock solution was determined by titrating the FIXa samples with a fluorogenic ester substrate, 4-methylumbelliferyl p′-guanidinobenzoate (MUGB). The principle titration assay was carried out essentially as described by Payne et al. (Biochemistry (1996) 35:7100-7106) with a few minor modifications to account for the slower reactivity of MUGB with FIXa. MUGB readily reacts with FIXa, but not FIX or inactive protease, to form an effectively stable acyl-enzyme intermediate under conditions in which the concentration of MUGB is saturating and deacylation is especially slow and rate limiting for catalysis. Under these conditions, the FIXa protease undergoes a single catalytic turnover to release the 4-methylumbelliferone fluorophore (4-MU). When the initial burst of fluorescence is calibrated to an external concentration standard curve of 4-MU fluorescence, the concentration of active sites can be calculated.

[0574] Assays were performed with a 1 mL reaction volume in a 0.4 cm×1 cm quartz cuvette, under continuous stirring with an assay buffer containing 50 mM Hepes, 100 mM NaCl, 5 mM CaCl₂) and 0.1% PEG 8000, pH 7.6. MUGB was prepared at a stock concentration of 0.04 M in DMSO based on the dry weight and diluted to a working concentration of 2 mM in DMSO. Titration assays were initiated by adding 4 μL of 2 mM MUGB to a final concentration of 8 μM in 1× assay buffer and first measuring the background hydrolysis of MUGB for ˜200-300 seconds before the addition of the FIXa or FIXa variant to a final concentration of 100-200 nM based on the total protein concentration determined for the activation reaction after removal of FXIa. The release of 4-MU fluorescence in the burst phase of the reaction was followed for a total of 2 hours in order to acquire sufficient data from the initial burst and subsequent steady state phases.

[0575] The amount of 4-MU released following catalysis of MUGB by FIXa was determined using a standard curve of 4-MU. A 4-MU standard solution was prepared at a stock concentration of 0.5 M in DMSO and the concentration confirmed by absorbance spectroscopy at 360 nm using an extinction coefficient of 19,000 M⁻¹ cm⁻¹ in 50 mM Tris buffer, pH 9.0. The standard curve of free 4-MU was prepared by titration of the absorbance-calibrated 4-MU into 1× assay buffer in 20 nM steps to a final concentration of 260-300 nM 4-MU.

[0576] For data analysis, reaction traces were imported into the Graphpad Prism software package and the contribution of background hydrolysis was subtracted from the curve by extrapolation of the initial measured rate of spontaneous MUGB hydrolysis, which was typically less than 5% of the total fluorescence burst. The corrected curve was fit to a single exponential equation with a linear component (to account for the slow rate of deacylation in the steady state phase) of the form ΔFluorescence=Amp(1−e^{-kt})+Bt, where Amp=the amplitude of the burst phase under the saturating assay conditions outline above, k is the observed first order rate constant for acyl-enzyme formation and B is a bulk rate constant associated with complete turnover of MUGB. The concentration of active FIXa protease is calculated by comparison of the fit parameter for amplitude to the 4-MU standard curve. The values from multiple assays were measured, averaged and the standard deviation determined. The concentration of FIX zymogen, which may become activated, in a stock solution was then determined by multiplying the A₂₈₀ determined total concentration of the FIX zymogen by the experimentally determined fraction active value for the fully activated sample (concentration of active FIXa/total concentration of FIXa).

### Example 4

### Determination of the Catalytic Activity of FIXa for its Substrate, Factor X

[0577] The catalytic activity of the FIXa variants for the substrate, Factor X (FX), was assessed indirectly in a fluorogenic assay by assaying for the activity of FXa, generated upon activation by FIXa, on the synthetic substrate Spectrafluor FXa. A range of FX concentrations were used to calculate the kinetic rate constants where the substrate protease (FX) was in excess by at least a 1000-fold over the concentration of the activating protease (FIXa). Briefly, activated and active site titrated FIXa was incubated in a calcium containing buffer with recombinant FVIII, phospholipid vesicles and alpha-thrombin (to activate FVIII to FVIIIa), forming the tenase (Xase) complex. The activity of alpha-thrombin was then quenched by the addition of a highly specific thrombin inhibitor, hirudin, prior to initiating the assay. FIXa variants (as part of the Xase complex) were subsequently mixed with various concentrations of FX and the fluorescent substrate, Spectrafluor FXa (CH₃SO₂-D-CHA-Gly-Arg-AMC) to initiate the assay. The release of the free fluorophore, AMC (7-amino-4-methylcoumarin) following catalysis of Spectrafluor FXa by FXa was then assessed continuously over a time period, and the kinetic rate constants of the FIXa variants determined.

### A. Assay Protocol

[0578] For assays evaluating the kinetic rate of FX activation by FIXa in the presence of FVIIIa and phospholipids, recombinant FVIII (Kogenate FS®; Bayer healthcare) was first resuspended in 5 mL of the provided diluent according to the manufacturer's instructions. The molar concentration of FVIII was then determined by absorbance at 280 nm using an extinction coefficient of 1.567 mg⁻¹ mL cm⁻¹ and a molecular weight of 163.6 kDa. The FIX variants were expressed, purified, activated and active site titrated as described in Examples 1-3, above. FIXa variants were then serially diluted to a concentration of 16 pM in a 200 μL volume of 1× Buffer A (20 mM Hepes/150 mM NaCl/5 mM CaCl₂)/0.1% BSA/0.1% PEG-8000, pH 7.4). In preparation for activation of FVIII to FVIIIa in the presence of FIXa and phospholipids, alpha-thrombin (Heamatologic Technologies, Inc.) and hirudin (American Diagnostica) were each diluted in a 1.0 mL volume of 1× Buffer A to 64 nM and 640 nM, respectively. Reconstituted FVIII was further diluted to a concentration of 267 nM in a 10 mL volume of 1× Buffer A containing 267 μM freshly resuspended phospholipids (75% phosphatidylcholine (PC)/25% phosphatidylserine (PS); PS/PC vesicles˜120 nm in diameter; Avanti Polar Lipids). FVIII was activated to FVIIIa by mixing 600 μL of the above FVIII/PC/PS solution with 100 μL of the 16 pM wild-type FIXa or FIXa variant dilution and 50 μL of the 64 nM alpha-thrombin solution followed by 15 minutes of incubation at 25° C. Activation reactions were subsequently quenched by the addition of 50 μL of the above 640 nM hirudin solution for 5 min at 25° C. prior to initiating the kinetic assay for FX activation. The final concentration of reagents in the 800 μL Xase complex solutions was as follows: 2 pM FIXa variant, 200 nM FVIIIa, 200 μM PC/PS vesicles, 4 nM alpha-thrombin (inhibited) and 40 nM hirudin.

[0579] A total of 25 μL of each Xase complex solution (FIXa/FVIIIa/Phospholipids/Ca²⁺) was aliquoted into a 96-well half-area black assay plate according to a predefined plate map (4 FIXa variants/plate). A solution of 900 nM active site titrated and DFP/EGR-cmk treated FX (see Example 2, above) was prepared in 5.6 mL of 1× Buffer A containing 1.0 mM Spectrafluor Xa substrate. This represented the highest concentration of FX tested and a sufficient volume for 4 assays. The FX/Spectrafluor Xa solution was then serially diluted 1.8-fold in an 8-channel deep-well polypropylene plate with a final volume of 2.5 mL 1× Buffer A that contains 1.0 mM Spectrafluor Xa, resulting in final dilutions of 900 nM, 500 nM, 277.8 nM, 154.3 nM, 85.7 nM, 47.6 nM, 25.6 nM and 0 nM FX. Alternatively in some assays, the FX/Specrafluor Xa solution was then serially diluted 1.5-fold in a 12-channel deep-well polypropylene plate with a final volume of 2.5 mL 1× Buffer A that contains 1.0 mM Spectrafluor Xa, resulting in final dilutions of 900 nM, 600 nM, 400 nM, 266.7 nM, 177.8 nM, 118.5 nM, 79.0 nM, 52.7 nM, 35.1 nM, 23.4 nM, 15.6 nM and 0 nM FX. Assay reactions were typically initiated using a BioMek FX liquid handling system programmed to dispense 25 μL of the FX/Spectrafluor Xa dilutions into 4 assay plates containing 25 μL of each FIXa variant (Xase complex). The final concentrations of the reagents in the assay were as follows: 1 pM FIXa, 100 nM FVIIIa, 100 μM PC/PS vesicles, 0.5 mM Spectrafluor Xa, 2 nM alpha-thrombin (inhibited), 20 nM hirudin and FX dilutions of 0 nM to 450 nM. Reactions were monitored in a SpectraMax fluorescence plate reader for 30 min at 37° C. A standard curve of free AMC served as the conversion factor for RFU to μM in the subsequent data analysis calculations using a dose range that covered 0 μM to 100 μM AMC.

### B. Data Analysis

[0580] All equations used to determine the steady-state kinetics of the catalysis of FX by FIXa are based on those described in the reference “Zymogen-Activation Kinetics: Modulatory effects of trans-4-(aminomethyl)cyclohexane-1-carboxylic acid and poly-D-lysine on plasminogen activation” in Petersen, et al. (1985) Biochem. J. 225:149-158. The theory for the steady-state kinetics of the system described by Scheme A (see below) is described by the expression of equation (1) that represents a parabolic accumulation of product.

[chemical structure]

[0581] According to the mechanism of Scheme A, a₀ is the concentration of activating protease (FIXa), z₀ is the concentration of zymogen (FX), kₐ and K_{z} represent the k_{cat} and K_{M} for the activator-catalyzed conversion of zymogen to active enzyme (FXa), whereas kₑ and Kₛ represent the k_{cat} and K_{M} for conversion of substrate to product by FXa over a given time t:

$$p = {a}_{0} \frac{{k}_{a} [ {z}_{0} ]}{{K}_{z} + [ {z}_{0} ]} * \frac{{k}_{e} [ {S}_{0} ]}{{K}_{s} + [ {S}_{0} ]} * \frac{{t}^{2}}{2} \qquad Equation ( 1 )$$

For analysis of progress curves, equation (1) was re-cast in the form of equation (2) where the steady-state kinetics of FXa hydrolysis of the fluorogenic substrate were determined independently and replaced by the compound constant k₂.

$$p = {a}_{0} \frac{{k}_{a} [ {z}_{0} ]}{{K}_{z} + [ {z}_{0} ]} * {k}_{2} * \frac{{t}^{2}}{2} \qquad Equation ( 2 )$$

The FXa activity on Spectrofluor FXa in 1× Buffer A was independently determined to have a K_{M} of 313.0 μM and a k_{cat} value of 146.4 s⁻¹. Substitution of these values into equation (3) gave a k₂ correction factor of 90 s⁻¹.

$${k}_{2} = \frac{{k}_{e} [ {S}_{0} ]}{{K}_{M} + [ {S}_{0} ]} \qquad Equation ( 3 )$$

[0582] To determine the degree of FIXa catalytic activity, raw data collected with the SoftMax Pro application (Molecular Devices) were exported as .XML files or .TXT files. Further non-linear data analyses were performed with XLfit4, a software package for automated curve fitting and statistical analysis within the Microsoft Excel spreadsheet environment (IDBS Software) or directly within the ActivityBase software package using the XE Runner data analysis module (IDBS Software). The spreadsheet template was set up to automatically fit the parabolic reaction velocities (μM/sec²) of the tested FIXa variants at each FX concentration to the function of a standard rectangular hyperbola (i.e. Michaelis Menten equation) given by equation (4) to yield the fit values for Vₘₐₓ and K_{M}.

$$Reaction Velocity ( µ M / {sec}^{2} ) = \frac{{V}_{max} [ {S}_{0} ]}{{K}_{M} + [ {S}_{0} ]} \qquad Equation ( 4 )$$

The k_{cat} value for the tested FIXa variant was then calculated from the fit value for Vₘₐₓ (μM/sec²) by equation (5).

$${k}_{cat} = \frac{{V}_{max}}{[ FIXa ] * 0.5 * {k}_{2}} \qquad Equation ( 5 )$$

The specificity constant k_{cat}/K_{M} was calculated directly from the fit value of K_{M} and the calculated k_{cat} that arose from evaluation of equation (5) above.

[0583] Tables 23-28 set forth the catalytic activity for each of the FIXa variants assayed. Also assayed were recombinant wild-type FIXa (termed Catalyst Biosciences WT; generated as described above in Example 1), plasma purified FIXa (Haematologic Technologies, Inc.), and BeneFIX® (Coagulation Factor IX (Recombinant); Wyeth). Tables 23-24 present the results expressed as the kinetic constant for catalytic activity, k_{cat}/K_{M} (M⁻¹s⁻¹), and also as the percentage of the activity of the wild-type FIXa, wherein the activity is catalytic activity, k_{cat}/K_{M} (M⁻¹ s⁻¹) of each FIXa variant for its substrate, FX. The individual rate constants k_{cat} and K_{M} are provided in Tables 25 and 26, and 27 and 28, respectively. Tables 24, 26 and 28 reflect data for additional FIXa variants and provide new overall averages calculated to include additional experimental replicates (n) for FIXa variants in Tables 23, 25 and 27. Where the activity of the FIXa variant was compared to wild-type FIXa, it was compared to a recombinant wild-type FIXa polypeptide that was expressed and purified using the same conditions as used for the variant FIXa polypeptides to ensure that any differences in activity were the result of the mutation(s), and not the result of differences in, for example, post-translational modifications associated with different expression systems. Thus, the wild-type FIXa polypeptide used for comparison was the recombinant wild-type FIXa generated from cloning the FIX gene set forth in SEQ ID NO:1 and expressed from CHOX cells as a polypeptide with an amino acid sequence set forth in SEQ ID NO:3, as described in Example 1 (i.e., Catalyst Biosciences WT FIX polypeptide). The standard deviation (S.D.), coefficient of variation (as a percentage; % CV) and the number of assays performed (n) also are provided for each kinetic parameter.

[0584] The observed catalytic activities of the FIXa variants ranged from no detectable Xase activity in a few variants (e.g., FIXa-F314N/H315S, FIXa-G317N, FIXa-R318N/A320S and FIXa-K400E/R403E) to a greater than 10-fold increase in k_{cat}/K_{M} for the activation of FX compared to wild-type FIXa. Some of the variants displayed markedly increased catalytic activity compared to the wild-type FIXa, including FIXa-R338E, FIXa-R338A, FIXa-T343R, FIXa-E410N and combinations thereof such as FIXa-R318Y/R338E/E410N, FIXa-R318Y/R338E/R402E/E410N, FIXa-R318Y/R338E/T343R/R402E/E410N, FIXa-R318Y/R338E/T343R/E410N and FIXa-R338E/T343R displayed some of the greatest increases in catalytic activity.

[0585] Although several FIXa variants with single or multiple additional glycosylation sites demonstrated close to wild-type activity (e.g., FIXa-I251S, FIXa-D85N/I251S, FIXa-K63N, FIXa-K247N/N249S, and FIXa-K63N/K247N/N249S) or improved activity when combined with other mutations (e.g., FIXa-K247N/N249S/R338E/T343R/R403E and FIXa-K247N/N249S/R318Y/R338E/T343R/R403E/E410N), others showed reduced catalytic activity. The augmented catalytic activity was due to improvements in k_{cat} or K_{M} or most often, both parameters.

TABLE 23
Catalytic activity of FIXa variants (k_{cat}/K_{M})

| | Mutation | | | | % of | |
|---|---|---|---|---|---|---|
| Mutation (Mature | (Chymotrypsin | k_{cat}/K_{M} | ±S.D. | | WT | |
| FIX Numbering) | Numbering) | (M⁻¹s⁻¹) | (M⁻¹V⁻¹) | % CV | k_{cat}/K_{M} | n |
| BeneFIX ® | BeneFIX ® | 4.1E+07 | 2.1E+07 | 51% | 91% | 125 |
| Coagulation FIX | Coagulation FIX | | | | | |
| (T148A) | (T[148]A) | | | | | |
| Plasma Purified | Plasma Purified | 5.2E+07 | 2.2E+07 | 41% | 117% | 120 |
| FIXa | FIXa | | | | | |
| Catalyst Biosciences | Catalyst Biosciences | 4.5E+07 | 2.5E+07 | 56% | 100% | 31 |
| WT | WT | | | | | |
| N157D | N[157]D | 2.9E+07 | 8.1E+06 | 28% | 64% | 2 |
| Y155F | Y[155]F | 4.1E+07 | 1.3E+05 | 0% | 93% | 2 |
| A103N/N105S/ | A[103]N/N[105]S/ | 3.9E+07 | 1.4E+06 | 4% | 88% | 2 |
| Y155F | Y[155]F | | | | | |
| D104N/K106S/ | D[104]N/K[106]S/ | 3.6E+07 | 1.0E+06 | 3% | 81% | 2 |
| Y155F | Y[155]F | | | | | |
| A103N/N105S | A[103]N/N[105]S | 3.7E+07 | 1.4E+07 | 38% | 82% | 9 |
| D104N/K106S | D[104]N/K[106]S | 3.8E+07 | 1.3E+07 | 34% | 86% | 9 |
| K106N/V108S | K[106]N/V[108]S | 2.8E+07 | 6.7E+06 | 24% | 62% | 7 |
| D85N | D[85]N | 7.3E+07 | 2.8E+07 | 38% | 164% | 15 |
| T148A | T[148]A | 4.0E+07 | 2.5E+07 | 62% | 89% | 30 |
| T148A† | T[148]A† | 2.3E+07 | 7.6E+06 | 33% | 52% | 7 |
| K5A | K[5]A | 5.6E+07 | 4.5E+06 | 8% | 125% | 2 |
| D64N | D[64]N | 1.0E+07 | 1.9E+06 | 19% | 22% | 2 |
| D64A | D[64]A | 2.5E+06 | 1.1E+06 | 47% | 5% | 2 |
| N167D | N[167]D | 3.1E+07 | 1.1E+07 | 34% | 69% | 2 |
| N167Q | N[167]Q | 3.5E+07 | 1.9E+07 | 53% | 79% | 4 |
| S61A | S[61]A | 4.8E+07 | 2.5E+07 | 52% | 108% | 4 |
| S53A | S[53]A | 3.5E+07 | 1.7E+07 | 48% | 78% | 3 |
| T159A | T[159]A | 3.7E+07 | 1.2E+07 | 33% | 82% | 3 |
| T169A | T[169]A | 4.7E+07 | 2.0E+07 | 43% | 106% | 3 |
| T172A | T[172]A | 5.0E+07 | 2.6E+07 | 52% | 112% | 3 |
| T179A | T[179]A | 5.5E+07 | 1.3E+07 | 23% | 122% | 3 |
| Y155H | Y[155]H | 5.0E+07 | 1.4E+07 | 27% | 113% | 3 |
| Y155Q | Y[155]Q | 5.4E+07 | 2.0E+07 | 36% | 121% | 3 |
| S158A | S[158]A | 3.6E+07 | 1.1E+06 | 3% | 81% | 2 |
| S158D | S[158]D | 4.0E+07 | 9.3E+05 | 2% | 89% | 2 |
| S158E | S[158]E | 3.7E+07 | 3.5E+06 | 9% | 82% | 2 |
| N157Q | N[157]Q | 3.2E+07 | 2.8E+06 | 9% | 72% | 2 |
| D203N/F205T | D39N/F41T | 2.2E+07 | 1.2E+07 | 53% | 50% | 12 |
| D85N/D203N/ | D[85]N/D39N/F41T | 3.0E+07 | 6.4E+06 | 22% | 66% | 5 |
| F205T | | | | | | |
| K228N | K63N | 3.6E+07 | 1.7E+07 | 49% | 80% | 13 |
| D85N/K228N | D[85]N/K63N | 4.6E+07 | 1.5E+07 | 32% | 104% | 6 |
| A103N/N105S/ | A[103]N/N[105]S/ | 2.9E+07 | 1.0E+07 | 35% | 64% | 3 |
| K228N | K63N | | | | | |
| D104N/K106S/ | D[104]N/K[106]S/ | 2.6E+07 | 7.6E+06 | 29% | 59% | 3 |
| K228N | K63N | | | | | |
| Y155F/K228N | Y[155]F/K63N | 4.5E+07 | 2.4E+06 | 5% | 101% | 2 |
| D104N/K106S/ | D[104]N/K[106]S/ | 5.9E+07 | 1.1E+07 | 19% | 132% | 2 |
| Y155F/K228N | Y[155]F/K63N | | | | | |
| I251S | I86S | 5.9E+07 | 1.2E+07 | 21% | 132% | 13 |
| D85N/I251S | D[85]N/I86S | 5.6E+07 | 1.1E+07 | 20% | 124% | 5 |
| D85N/D104N/ | D[85]N/D[104]N/ | 3.3E+07 | 6.4E+06 | 19% | 75% | 5 |
| K106S/I251S | K[106]S/I86S | | | | | |
| A103N/N105S/ | A[103]N/N[105]S/ | 3.9E+07 | 2.6E+07 | 67% | 87% | 3 |
| I251S | I86S | | | | | |
| D104N/K106S/ | D[104]N/K[106]S/ | 2.9E+07 | 1.1E+06 | 4% | 66% | 2 |
| I251S | I86S | | | | | |
| Y155F/I251S | Y[155]F/I86S | 6.7E+07 | 5.9E+06 | 9% | 149% | 2 |
| A262S | A95bS | 2.4E+07 | 1.0E+07 | 42% | 54% | 8 |
| K413N | K243N | 2.9E+07 | 1.7E+07 | 58% | 64% | 5 |
| E410N | E240N | 1.3E+08 | 8.6E+07 | 65% | 297% | 21 |
| E410N* | E240N* | 3.0E+07 | 1.1E+07 | 36% | 66% | 11 |
| E239N | E74N | 2.0E+07 | 1.1E+07 | 58% | 44% | 9 |
| T241N/H243S | T76N/H78S | 1.9E+07 | 5.7E+05 | 3% | 42% | 2 |
| K247N/N249S | K82N/N84S | 5.4E+07 | 1.7E+07 | 32% | 122% | 11 |
| Y155F/K247N/ | Y[155]F/K82N/ | 5.1E+07 | 9.6E+06 | 19% | 113% | 4 |
| N249S | N84S | | | | | |
| A103N/N105S/ | A[103]N/N[105]S/ | 4.0E+07 | 5.2E+06 | 13% | 90% | 6 |
| K247N/N249S | K82N/N84S | | | | | |
| D104N/K106S/ | D[104]N/K[106]S/ | 3.2E+07 | 3.3E+06 | 10% | 72% | 2 |
| K247N/N249S | K82N/N84S | | | | | |
| D104N/K106S/ | D[104]N/K[106]S/ | 3.2E+07 | 1.1E+07 | 36% | 71% | 3 |
| Y155F/K247N/N249S | Y[155]F/K82N/N84S | | | | | |
| L321N | L153N | 1.6E+07 | 2.0E+06 | 13% | 35% | 2 |
| F314N/H315S | F145N/H147S | No | n.d. | n.d. | 0% | 4 |
| | | Activity | | | | |
| S319N/L321S | S151N/L153S | 2.8E+07 | 2.2E+07 | 78% | 64% | 3 |
| N260S | N95S | 1.8E+07 | 1.2E+07 | 66% | 39% | 13 |
| D104N/K106S/ | D[104]N/K[106]S/ | 1.3E+07 | 6.6E+06 | 51% | 29% | 2 |
| N260S | N95S | | | | | |
| Y155F/N260S | Y[155]F/N95S | 1.9E+07 | 1.6E+07 | 83% | 43% | 2 |
| D104N/K106S/ | D[104]N/K[106]S/ | 4.3E+06 | 2.0E+06 | 46% | 10% | 2 |
| Y155F/N260S | Y[155]F/N95S | | | | | |
| Y284N | Y117N | 3.5E+07 | 1.5E+07 | 42% | 78% | 8 |
| G317N | G149N | No | n.d. | n.d. | 0% | 5 |
| | | Activitv | | | | |
| R318N/A320S | R150N/A152S | No | n.d. | n.d. | 0% | 8 |
| | | Activity | | | | |
| R318A | R150A | 4.9E+07 | 7.4E+06 | 15% | 108% | 3 |
| R318E | R150E | 1.7E+07 | 4.2E+06 | 25% | 38% | 3 |
| R318Y | R150Y | 7.0E+07 | 7.0E+06 | 10% | 156% | 3 |
| R312Q | R143Q | 1.1E+07 | 1.8E+06 | 17% | 23% | 3 |
| R312A | R143A | 4.6E+06 | 9.3E+05 | 20% | 10% | 2 |
| R312Y | R143Y | 1.2E+07 | 4.2E+06 | 36% | 27% | 2 |
| R312L | R143L | 2.4E+07 | 9.4E+06 | 39% | 54% | 2 |
| V202M | V38M | 6.6E+07 | 2.6E+07 | 39% | 148% | 2 |
| V202Y | V38Y | 2.5E+07 | 1.6E+06 | 6% | 56% | 2 |
| D203M | D39M | 4.5E+07 | 1.9E+07 | 42% | 101% | 5 |
| D203Y | D39Y | 3.0E+07 | 2.8E+06 | 9% | 67% | 4 |
| A204M | A40M | 1.8E+07 | 1.2E+07 | 67% | 40% | 5 |
| A204Y | A40Y | 4.6E+07 | 7.6E+06 | 16% | 103% | 2 |
| K400A/R403A | K230A/R233A | 5.3E+06 | 6.9E+05 | 13% | 12% | 2 |
| K400E/R403E | K230E/R233E | No | n.d. | n.d. | 0% | 4 |
| | | Activity | | | | |
| R403A | R233A | 1.4E+07 | 3.0E+06 | 22% | 31% | 7 |
| R403E | R233E | 5.5E+06 | 1.5E+06 | 28% | 12% | 6 |
| K400A | K230A | 2.0E+07 | 3.1E+06 | 16% | 44% | 2 |
| K400E | K230E | 9.5E+06 | 1.1E+06 | 12% | 21% | 2 |
| K293E | K126E | 8.1E+06 | 5.4E+05 | 7% | 18% | 2 |
| K293A | K126A | 2.1E+07 | 4.4E+06 | 21% | 46% | 2 |
| R333A | R165A | No | n.d. | n.d. | 0% | 2 |
| | | Activity | | | | |
| R333E | R165E | No | n.d. | n.d. | 0% | 2 |
| | | Activity | | | | |
| R338A | R170A | 1.6E+08 | 2.5E+07 | 15% | 361% | 2 |
| R338E | R170E | 1.8E+08 | 8.3E+07 | 45% | 408% | 10 |
| R338A/R403A | R170A/R233A | 5.3E+07 | 1.3E+07 | 24% | 119% | 6 |
| R338E/R403E | R170E/R233E | 6.2E+07 | 8.8E+06 | 14% | 138% | 2 |
| K293A/R403A | K126A/R233A | 5.7E+06 | 1.4E+06 | 25% | 13% | 2 |
| K293E/R403E | K126E/R233E | 1.3E+06 | 8.5E+04 | 6% | 3% | 2 |
| K293A/R338A/ | K126A/R170A/ | 2.5E+07 | 9.5E+06 | 39% | 55% | 2 |
| R403A | R233A | | | | | |
| K293E/R338E/ | K126E/R170E/ | 1.7E+07 | 5.7E+05 | 3% | 37% | 2 |
| R403E | R233E | | | | | |
| R318A/R403A | R150A/R233A | 1.5E+07 | 1.3E+06 | 9% | 33% | 2 |
| R318E/R403E | R150E/R233E | 1.2E+06 | 3.8E+05 | 33% | 3% | 2 |
| R318Y/E410N | R150Y/E240N | 7.5E+07 | 2.7E+07 | 35% | 168% | 21 |
| R338E/E410N | R170E/E240N | 4.6E+08 | 1.7E+08 | 38% | 1018% | 8 |
| R338E/R403E/ | R170E/R233E/ | 7.8E+07 | 3.7E+07 | 47% | 175% | 7 |
| E410N | E240N | | | | | |
| R318Y/R338E/ | R150Y/R170E/ | 6.5E+07 | 4.6E+06 | 7% | 145% | 2 |
| R403E | R233E | | | | | |
| D203N/F205T/ | D39N/F41T/K63N | 1.4E+07 | 2.5E+06 | 18% | 31% | 2 |
| K228N | | | | | | |
| D203N/F205T/ | D39N/F41T/E240N | 4.2E+07 | 1.7E+07 | 40% | 94% | 6 |
| E410N | | | | | | |
| D203N/F205T/ | D39N/F41T/R170E | 1.0E+08 | 2.3E+07 | 22% | 234% | 2 |
| R338E | | | | | | |
| D203N/F205T/ | D39N/F41T/R170A | 6.2E+07 | 1.4E+07 | 22% | 139% | 3 |
| R338A | | | | | | |
| D203N/F205T/ | D39N/F41T/R150Y | 2.0E+07 | 2.5E+06 | 12% | 45% | 4 |
| R318Y | | | | | | |
| D203N/F205T/ | D39N/F41T/R170E/ | 1.9E+07 | 4.8E+06 | 25% | 42% | 2 |
| R338E/R403E | R233E | | | | | |
| K228N/E410N | K63N/E240N | 8.5E+07 | 3.4E+07 | 40% | 190% | 10 |
| K228N/R338E | K63N/R170E | 2.1E+08 | 6.1E+07 | 29% | 469% | 2 |
| K228N/R338A | K63N/R170A | 2.1E+08 | 4.6E+07 | 22% | 473% | 2 |
| K228N/R318Y | K63N/R150Y | 4.7E+07 | 6.5E+06 | 14% | 105% | 5 |
| K228N/R338E/ | K63N/R170E/ | 4.8E+07 | 8.6E+06 | 18% | 108% | 2 |
| R403E | R233E | | | | | |
| R403E/E410N | R233E/E240N | 2.1E+07 | 1.7E+06 | 8% | 47% | 2 |
| R318Y/R338E/ | R150Y/R170E/E240N | 3.4E+08 | 1.4E+08 | 39% | 770% | 26 |
| E410N | | | | | | |
| D104N/K106S/ | D[104]N/K[106]S/ | 2.6E+08 | 5.9E+07 | 23% | 581% | 4 |
| R318Y/R338E/ | R150Y/R170E/E240N | | | | | |
| E410N | | | | | | |
| Y155F/R318Y/ | Y[155]F/R150Y/ | 3.7E+08 | 1.3E+08 | 33% | 835% | 5 |
| R338E/E410N | R170E/E240N | | | | | |
| K228N/R318Y/ | K63N/R150Y/ | 1.2E+08 | 2.6E+07 | 22% | 272% | 4 |
| E410N | E240N | | | | | |
| R318Y/R403E/ | R150Y/R233E/ | 2.7E+07 | 3.8E+06 | 14% | 59% | 3 |
| E410N | E240N | | | | | |
| R318Y/R338E/ | R150Y/R170E/ | 1.2E+08 | 8.1E+07 | 69% | 262% | 14 |
| R403E/E410N | R233E/E240N | | | | | |
| A103N/N105S/R318Y/ | A[103]N/N[105]S/ | 1.5E+08 | 7.3E+07 | 50% | 327% | 5 |
| R338E/R403E/E410N | R150Y/R170E/R233E/E240N | | | | | |
| D104N/K106S/R318Y/ | D[104]N/K[106]S/ | 1.7E+08 | 7.9E+07 | 47% | 377% | 3 |
| R338E/R403E/E410N | R150Y/R170E/R233E/E240N | | | | | |
| Y155F/R318Y/ | Y[155]F/R150Y/R170E/ | 1.9E+08 | 5.0E+07 | 27% | 418% | 4 |
| R338E/R403E/E410N | R233E/E240N | | | | | |
| A103N/N105S/Y155F/ | A[103]N/N[105]S/ | 1.3E+08 | 1.8E+06 | 1% | 283% | 2 |
| R318Y/R338E/R403E/ | Y[155]/R150Y/R170E/ | | | | | |
| E410N | R233E/E240N | | | | | |
| D104N/K106S/Y155F/ | D[104]N/K[106]S/ | 1.8E+08 | 9.1E+06 | 5% | 394% | 2 |
| R318Y/R338E/R403E/ | Y[155]F/R150Y/R170E/ | | | | | |
| E410N | R233E/E240N | | | | | |
| D203N/F205T/R318Y/ | D39N/F41T/R150Y/ | 3.9E+07 | 2.0E+07 | 52% | 88% | 6 |
| E410N | E240N | | | | | |
| R333S | R165S | 1.1E+05 | 5.5E+04 | 51% | 0.2% | 3 |
| R338L | R170L | 2.0E+08 | 2.3E+07 | 11% | 444% | 3 |
| K316N | K148N | 6.2E+06 | 4.2E+06 | 69% | 14% | 3 |
| K316A | K148A | 6.1E+06 | 8.2E+05 | 13% | 14% | 3 |
| K316E | K148E | 7.1E+05 | 1.4E+05 | 19% | 2% | 3 |
| K316S | K148S | 3.9E+06 | 6.2E+05 | 16% | 9% | 3 |
| K316M | K148M | 3.1E+07 | 1.4E+07 | 46% | 70% | 3 |
| E239S | E74S | 3.4E+07 | 1.8E+07 | 52% | 75% | 3 |
| E239A | E74A | 4.9E+07 | 6.2E+06 | 13% | 110% | 3 |
| E239R | E74R | 5.6E+07 | 1.1E+07 | 19% | 126% | 3 |
| E239K | E74K | 5.1E+07 | 5.1E+06 | 10% | 114% | 3 |
| H257F | H92F | 4.8E+07 | 6.6E+06 | 14% | 108% | 3 |
| H257Y | H92Y | 3.4E+07 | 9.1E+06 | 27% | 75% | 3 |
| H257E | H92E | 2.7E+07 | 1.5E+07 | 57% | 60% | 3 |
| H257S | H92S | 3.5E+07 | 1.3E+07 | 36% | 78% | 3 |
| T412A | T242A | 4.6E+07 | 2.8E+07 | 62% | 103% | 5 |
| T412V | T242V | 5.8E+07 | 3.2E+07 | 55% | 130% | 8 |
| E410N/T412A | E240N/T242A | 8.0E+07 | 1.7E+07 | 21% | 178% | 4 |
| E410N/T412V | E240N/T242V | 8.8E+07 | 2.7E+07 | 30% | 197% | 4 |
| E410Q | E240Q | 1.2E+08 | 7.6E+07 | 63% | 269% | 4 |
| E410S | E240S | 1.1E+08 | 6.6E+07 | 60% | 246% | 12 |
| E410A | E240A | 1.1E+08 | 5.6E+07 | 50% | 248% | 10 |
| E410D | E240D | 6.0E+07 | 1.6E+07 | 27% | 134% | 4 |
| N346D | N178D | 1.9E+07 | 8.5E+06 | 44% | 43% | 4 |
| Y155F/N346D | Y[155]F/N178D | 1.3E+07 | 6.8E+06 | 53% | 29% | 2 |
| N346Y | N178Y | 9.8E+07 | 2.3E+07 | 24% | 218% | 8 |
| Y345A | Y177A | 1.5E+07 | 6.3E+06 | 43% | 32% | 4 |
| Y345T | Y177T | 5.0E+07 | 2.5E+07 | 50% | 112% | 4 |
| T343R | T175R | 1.7E+08 | 1.1E+08 | 66% | 372% | 9 |
| T343E | T175E | 4.0E+07 | 2.3E+07 | 58% | 88% | 4 |
| T343Q | T175Q | 7.1E+07 | 2.2E+07 | 30% | 159% | 3 |
| F342I | F174I | 5.4E+07 | 2.9E+07 | 54% | 121% | 3 |
| T343R/Y345T | T175R/Y177T | 9.3E+07 | 1.8E+07 | 19% | 208% | 3 |
| R318Y/R338E | R150Y/R170E | 1.5E+08 | 5.3E+07 | 36% | 331% | 4 |
| Y259F/K265T/Y345T | Y94F/K98T/Y177T | 5.6E+07 | 1.2E+07 | 21% | 126% | 2 |
| K228N/I251S | K63N/I86S | 2.2E+07 | 5.7E+05 | 3% | 50% | 2 |
| K228N/R318Y/R338E/ | K63N/R150Y/R170E/ | 1.6E+08 | 6.1E+07 | 39% | 349% | 3 |
| R403E/E410N | R233E/E240N | | | | | |
| Y155F/K228N/R318Y/ | Y[155]F/K63N/R150Y/ | 2.0E+08 | 9.3E+06 | 5% | 453% | 2 |
| R338E/R403E/E410N | R170E/R233E/E240N | | | | | |
| D85N/K228N/R318Y/ | D[85]N/K63N/R150Y/ | 1.6E+08 | 2.3E+07 | 15% | 346% | 2 |
| R338E/R403E/E410N | R170E/R233E/E240N | | | | | |
| I251S/R318Y/R338E/ | I86S/R150Y/R170E/ | 1.5E+08 | 4.2E+07 | 27% | 344% | 4 |
| R403E/E410N | R233E/E240N | | | | | |
| D104N/K106S/I251S/ | D[104]N/K[106]S/ | 1.2E+08 | 2.0E+07 | 16% | 271% | 8 |
| R318Y/R338E/R403E/ | I86S/R150Y/R170E/ | | | | | |
| E410N | R233E/E240N | | | | | |
| Y155F/I251S/R318Y/ | Y[155]F/I86S/R150Y/ | 1.7E+08 | 9.2E+06 | 6% | 374% | 2 |
| R338E/R403E/E410N | R170E/R233E/E240N | | | | | |
| I251S/R318Y/R338E/ | I86S/R150Y/R170E/E240N | 3.8E+08 | 6.1E+07 | 16% | 851% | 7 |
| E410N | | | | | | |
| D104N/K106S/I251S/ | D[104]N/K[106]S/ | 1.3E+08 | 3.2E+07 | 24% | 300% | 3 |
| R318Y/R338E/E410N | I86S/R150Y/R170E/E240N | | | | | |
| F314N/K316S | F145N/K148S | 8.8E+04 | 8.2E+04 | 94% | 0.2% | 2 |
| K247N/N249S/R318Y/ | K82N/N84S/R150Y/R170E/ | 1.5E+08 | 4.7E+07 | 30% | 341% | 6 |
| R338E/R403E/E410N | R233E/E240N | | | | | |
| Y155F/K247N/N249S/ | Y[155]F/K82N/N84S/ | 1.8E+08 | 6.1E+07 | 33% | 408% | 6 |
| R318Y/R338E/R403E/ | R150Y/R170E/R233E/ | | | | | |
| E410N | E240N | | | | | |
| A103N/N105S/K247N/ | A[103]N/N[105]S/ | 1.0E+08 | 7.6E+06 | 7% | 232% | 2 |
| N249S/R318Y/R338E/ | K82N/N84S/R150Y/R170E/ | | | | | |
| R403E/E410N | R233E/E240N | | | | | |
| D104N/K106S/K247N/ | D[104]N/K[106]S/ | 8.8E+07 | 6.5E+06 | 7% | 197% | 2 |
| N249S/R318Y/R338E/ | K82N/N84S/R150Y/R170E/ | | | | | |
| R403E/E410N | R233E/E240N | | | | | |
| K247N/N249S/R318Y/ | K82N/N84S/R150Y/ | 2.3E+08 | 6.6E+07 | 28% | 516% | 6 |
| R338E/E410N | R170E/E240N | | | | | |
| Y155F/K247N/N249S/ | Y[155]F/K82N/N84S/ | 3.0E+08 | 1.3E+08 | 42% | 674% | 7 |
| R318Y/R338E/E410N | R150Y/R170E/E240N | | | | | |
| R318Y/R338E/R403E/ | R150Y/R170E/R233E/ | 1.8E+08 | 6.2E+07 | 34% | 401% | 4 |
| E410S | E240S | | | | | |
| R318Y/R338E/E410S | R150Y/R170E/E240S | 3.3E+08 | 1.2E+08 | 37% | 730% | 8 |
| K228N/K247N/N249S | K63N/K82N/N84S | 3.8E+07 | 1.2E+07 | 32% | 86% | 2 |
| D104N/K106S/Y155F/ | D[104]N/K[106]S/ | 6.3E+07 | 3.3E+06 | 5% | 142% | 2 |
| K228N/K247N/N249S | Y[155]F/K63N/K82N/N84S | | | | | |
| D104N/K106S/K228N/ | D[104]N/K[106]S/ | 2.3E+07 | 1.1E+07 | 48% | 51% | 5 |
| K247N/N249S | K63N/K82N/N84S | | | | | |
| Y155F/K228N/K247N/ | Y[155]F/K63N/K82N/ | 5.3E+07 | 5.5E+06 | 10% | 118% | 2 |
| N249S | N84S | | | | | |
| K228N/K247N/N249S/ | K63N/K82N/N84S/R150Y/ | 1.2E+08 | 3.8E+07 | 33% | 258% | 3 |
| R318Y/R338E/R403E/ | R170E/R233E/E240N | | | | | |
| E410N | | | | | | |
| R318Y/R338E/R403E/ | R150Y/R170E/R233E/ | 1.9E+08 | 5.0E+07 | 26% | 424% | 4 |
| E410N/T412V | E240N/T242V | | | | | |
| R318Y/R338E/R403E/ | R150Y/R170E/R233E/ | 2.6E+08 | 7.4E+07 | 29% | 577% | 4 |
| E410N/T412A | E240N/T242A | | | | | |
| R318Y/R338E/R403E/ | R150Y/R170E/R233E/ | 8.0E+07 | 3.4E+07 | 42% | 178% | 4 |
| T412A | T242A | | | | | |
| R318Y/R338E/T412A | R150Y/R170E/T242A | 3.0E+08 | 8.3E+07 | 28% | 661% | 6 |
| R318Y/R338E/E410N/ | R150Y/R170E/E240N/ | 2.4E+08 | 1.4E+08 | 60% | 536% | 4 |
| T412V | T242V | | | | | |
| N260S/R318Y/R338E/ | N95S/R150Y/R170E/ | 5.3E+07 | 6.6E+05 | 1% | 117% | 2 |
| R403E/E410N | R233E/E240N | | | | | |
| D104N/K106S/N260S/ | D[104]N/K[106]S/ | 8.8E+07 | 7.9E+06 | 9% | 196% | 2 |
| R318Y/R338E/R403E/ | N95S/R150Y/R170E/R233E/ | | | | | |
| E410N | E240N | | | | | |
| Y155F/N260S/R318Y/ | Y[155]F/N95S/R150Y/ | 7.0E+07 | 2.4E+07 | 35% | 156% | 2 |
| R338E/R403E/E410N | R170E/R233E/E240N | | | | | |
| R318Y/R338E/N346D/ | R150Y/R170E/N178D/ | 3.1E+07 | 9.1E+06 | 30% | 68% | 2 |
| R403E/E410N | R233E/E240N | | | | | |
| Y155F/R318Y/R338E/ | Y[155]F/R150Y/R170E/ | 6.2E+07 | 1.8E+07 | 30% | 139% | 2 |
| N346D/R403E/E410N | N178D/R233E/E240N | | | | | |
| K247N/N249S/N260S | K82N/N84S/N95S | 2.9E+07 | 2.6E+06 | 9% | 64% | 2 |
| Y155F/K247N/N249S/ | Y[155]F/K82N/N84S/ | 1.9E+07 | 4.2E+06 | 22% | 43% | 2 |
| N260S | N95S | | | | | |
| D104N/K106S/K247N/ | D[104]N/K[106]S/ | 9.8E+06 | 3.0E+06 | 30% | 22% | 2 |
| N249S/N260S | K82N/N84S/N95S | | | | | |
| DI04N/K106S/Y155F/ | D[104]N/K[106]S/ | 8.2E+06 | 3.9E+06 | 47% | 18% | 2 |
| K247N/N249S/N260S | Y[155]F/K82N/N84S/N95S | | | | | |
| K247N/N249S/N260S/ | K82N/N84S/N95S/ | 9.7E+07 | 8.7E+06 | 9% | 217% | 2 |
| R318Y/R338E/R403E/ | R150Y/R170E/R233E/ | | | | | |
| E410N | E240N | | | | | |
| Y155F/N260S/N346D | Y[155]F/N95S/ | 2.2E+06 | 7.4E+05 | 34% | 5% | 2 |
| | N178D | | | | | |
| R318Y/R338E/T343R/ | R150Y/R170E/T175R/ | 5.4E+08 | 1.6E+08 | 29% | 1217% | 3 |
| R403E/E410N | R233E/E240N | | | | | |
| R338E/T343R | R170E/T175R | 6.0E+08 | 1.7E+08 | 29% | 1329% | 4 |

†produced in BHK-21 cells;
*80% glycosylated form of E410N

TABLE 24
Catalytic activity of FIXa variants (k_{cat}/K_{M})

| | Mutation | | | | % of | |
|---|---|---|---|---|---|---|
| Mutation (Mature | (Chymotrypsin | k_{cat}/K_{M} | ±S.D. | | WT | |
| FIX Numbering) | Numbering) | (M⁻¹s⁻¹) | (M⁻¹V⁻¹) | % CV | k_{cat}/K_{M} | n |
| BeneFIX ® | BeneFIX ® | 4.3E+07 | 2.3E+07 | 54% | 92% | 140 |
| Coagulation FIX | Coagulation FIX | | | | | |
| (T148A) | (T[148]A) | | | | | |
| Plasma Purified | Plasma Purified | 5.6E+07 | 2.6E+07 | 46% | 122% | 200 |
| FIXa | FIXa | | | | | |
| Catalyst | Catalyst | 4.6E+07 | 2.5E+07 | 54% | 100% | 33 |
| Biosciences WT | Biosciences WT | | | | | |
| N157D | N[1571D | 2.9E+07 | 8.1E+06 | 28% | 62% | 2 |
| Y155F | Y[155]F | 4.1E+07 | 1.3E+05 | 0% | 90% | 2 |
| A103N/N105S/ | A[103]N/N[105]S/ | 3.9E+07 | 1.4E+06 | 4% | 85% | 2 |
| Y155F | Y[155]F | | | | | |
| D104N/K106S/ | D[104]N/K[106]S/ | 3.6E+07 | 1.0E+06 | 3% | 78% | 2 |
| Y155F | Y[155]F | | | | | |
| A103N/N105S | A[103]N/N[105]S | 3.7E+07 | 1.4E+07 | 38% | 80% | 9 |
| D104N/K106S | D[104]N/K[106]S | 3.8E+07 | 1.3E+07 | 34% | 83% | 9 |
| K106N/V108S | K[106]N/V[108]S | 2.8E+07 | 6.7E+06 | 24% | 60% | 7 |
| D85N | D[85]N | 7.0E+07 | 2.7E+07 | 39% | 153% | 17 |
| T148A | T[1481A | 4.0E+07 | 2.2E+07 | 54% | 88% | 44 |
| T148A† | T[148]A† | 2.3E+07 | 7.6E+06 | 33% | 50% | 7 |
| K5A | K[5]A | 5.5E+07 | 9.3E+06 | 17% | 120% | 4 |
| D64N | D[64]N | 1.0E+07 | 1.9E+06 | 19% | 22% | 2 |
| D64A | D[64]A | 2.5E+06 | 1.1E+06 | 47% | 5% | 2 |
| N167D | N[167]D | 3.1E+07 | 1.1E+07 | 34% | 67% | 2 |
| N167Q | N[167]Q | 3.5E+07 | 1.9E+07 | 53% | 76% | 4 |
| S61A | S[61]A | 4.8E+07 | 2.5E+07 | 52% | 105% | 4 |
| S53A | S[53]A | 3.5E+07 | 1.7E+07 | 48% | 76% | 3 |
| T159A | T[159]A | 3.7E+07 | 1.2E+07 | 33% | 80% | 3 |
| T169A | T[169]A | 4.7E+07 | 2.0E+07 | 43% | 103% | 3 |
| T172A | T[172]A | 5.0E+07 | 2.6E+07 | 52% | 109% | 3 |
| T179A | T[179]A | 5.5E+07 | 1.3E+07 | 23% | 119% | 3 |
| Y155H | Y[155]H | 5.0E+07 | 1.4E+07 | 27% | 109% | 3 |
| Y155Q | Y[155]Q | 5.4E+07 | 2.0E+07 | 36% | 117% | 3 |
| S158A | S[158]A | 3.6E+07 | 1.1E+06 | 3% | 79% | 2 |
| S158D | S[158]D | 4.0E+07 | 9.3E+05 | 2% | 86% | 2 |
| S158E | S[158]E | 3.7E+07 | 3.5E+06 | 9% | 80% | 2 |
| N157Q | N[157]Q | 3.2E+07 | 2.8E+06 | 9% | 70% | 2 |
| D203N/F205T | D39N/F41T | 2.2E+07 | 1.2E+07 | 53% | 49% | 12 |
| D85N/D203N/F205T | D[85]N/D39N/F41T | 3.0E+07 | 6.4E+06 | 22% | 64% | 5 |
| K228N | K63N | 3.6E+07 | 1.7E+07 | 49% | 77% | 13 |
| D85N/K228N | D[85]N/K63N | 4.6E+07 | 1.5E+07 | 32% | 101% | 6 |
| A103N/N105S/K228N | A[103]N/N[105]S/ | 2.9E+07 | 1.0E+07 | 35% | 63% | 3 |
| | K63N | | | | | |
| D104N/K106S/K228N | D[104]N/K[106]S/ | 2.6E+07 | 7.6E+06 | 29% | 57% | 3 |
| | K63N | | | | | |
| Y155F/K228N | Y[155]F/K63N | 4.5E+07 | 2.4E+06 | 5% | 98% | 2 |
| D104N/K106S/Y155F/ | D[104]N/K[106]S/ | 5.9E+07 | 1.1E+07 | 19% | 129% | 2 |
| K228N | Y[155]F/K63N | | | | | |
| I251S | I86S | 5.9E+07 | 1.2E+07 | 21% | 128% | 13 |
| D85N/I251S | D[85]N/I86S | 5.6E+07 | 1.1E+07 | 20% | 121% | 5 |
| D85N/D104N/K106S/ | D[85]N/D[104]N/ | 3.3E+07 | 6.4E+06 | 19% | 73% | 5 |
| I251S | K[106]S/I86S | | | | | |
| A103N/N105S/I251S | A[103]N/N[105]S/ | 3.9E+07 | 2.6E+07 | 67% | 84% | 3 |
| | I86S | | | | | |
| D104N/K106S/I251S | D[104]N/K[106]S/ | 2.9E+07 | 1.1E+06 | 4% | 64% | 2 |
| | I86S | | | | | |
| Y155F/I251S | Y[155]F/I86S | 6.7E+07 | 5.9E+06 | 9% | 145% | 2 |
| A262S | A95bS | 2.4E+07 | 1.0E+07 | 42% | 52% | 8 |
| K413N | K243N | 2.8E+07 | 1.4E+07 | 51% | 60% | 7 |
| E410N | E240N | 1.3E+08 | 7.7E+07 | 60% | 277% | 27 |
| E410N* | E240N* | 3.0E+07 | 1.1E+07 | 36% | 65% | 10 |
| E239N | E74N | 2.0E+07 | 1.1E+07 | 58% | 43% | 9 |
| T241N/H243S | T76N/H78S | 1.9E+07 | 5.7E+05 | 3% | 41% | 2 |
| K247N/N249S | K82N/N84S | 5.4E+07 | 1.7E+07 | 32% | 118% | 11 |
| Y155F/K247N/N249S | Y[155]F/K82N/N84S | 5.1E+07 | 9.6E+06 | 19% | 110% | 4 |
| A103N/N105S/K247N/ | A[103]N/N[105]S/ | 4.0E+07 | 5.2E+06 | 13% | 87% | 6 |
| N249S | K82N/N84S | | | | | |
| D104N/K106S/K247N/ | D[104]N/K[106]S/ | 3.2E+07 | 3.3E+06 | 10% | 69% | 2 |
| N249S | K82N/N84S | | | | | |
| D104N/K106S/Y155F/ | D[104]N/K[106]S/ | 3.2E+07 | 1.1E+07 | 36% | 69% | 3 |
| K247N/N249S | Y[155]F/K82N/N84S | | | | | |
| L321N | L153N | 1.6E+07 | 2.0E+06 | 13% | 34% | 2 |
| F314N/H315S | F145N/H147S | 4.4E+05 | 3.7E+04 | 8% | 1% | 2 |
| K392N/K394S | K222N/K224S | 0.0E+00 | n.d. | n.d. | 0% | 0 |
| S319N/L321S | S151N/L153S | 2.8E+07 | 2.2E+07 | 78% | 62% | 3 |
| N260S | N95S | 1.8E+07 | 1.2E+07 | 66% | 38% | 13 |
| D104N/K106S/N260S | D[104]N/K[106]S/ | 1.3E+07 | 6.6E+06 | 51% | 28% | 2 |
| | N95S | | | | | |
| Y155F/N260S | Y[1551F/N95S | 1.9E+07 | 1.6E+07 | 83% | 42% | 2 |
| D104N/K106S/Y155F/ | D[104]N/K[106]S/ | 4.3E+06 | 2.0E+06 | 46% | 9% | 2 |
| N260S | Y[155]F/N95S | | | | | |
| Y284N | Y117N | 3.5E+07 | 1.5E+07 | 42% | 76% | 8 |
| G317N | G149N | 4.6E+04 | n.d. | n.d. | 0% | 1 |
| R318N/A320S | R150N/A152S | 2.3E+05 | 2.1E+05 | 89% | 1% | 3 |
| R318A | R150A | 4.5E+07 | 6.4E+06 | 14% | 98% | 2 |
| R318E | R150E | 1.7E+07 | 4.2E+06 | 25% | 37% | 3 |
| R318Y | R150Y | 7.0E+07 | 7.0E+06 | 10% | 151% | 3 |
| R312Q | R143Q | 1.1E+07 | 1.8E+06 | 17% | 23% | 3 |
| R312A | R143A | 4.6E+06 | 9.3E+05 | 20% | 10% | 2 |
| R312Y | R143Y | 1.2E+07 | 4.2E+06 | 36% | 26% | 2 |
| R312L | R143L | 2.4E+07 | 9.4E+06 | 39% | 53% | 2 |
| V202M | V38M | 6.6E+07 | 2.6E+07 | 39% | 143% | 2 |
| V202Y | V38Y | 2.5E+07 | 1.6E+06 | 6% | 55% | 2 |
| D203M | D39M | 4.5E+07 | 1.9E+07 | 42% | 98% | 5 |
| D203Y | D39Y | 3.0E+07 | 2.8E+06 | 9% | 65% | 4 |
| A204M | A40M | 1.8E+07 | 1.2E+07 | 67% | 39% | 5 |
| A204Y | A40Y | 4.6E+07 | 7.6E+06 | 16% | 100% | 2 |
| K400A/R403A | K230A/R233A | 5.3E+06 | 6.9E+05 | 13% | 12% | 2 |
| K400E/R403E | K230E/R233E | 4.3E+05 | 3.1E+04 | 7% | 1% | 3 |
| R403A | R233A | 1.4E+07 | 3.0E+06 | 22% | 30% | 7 |
| R403E | R233E | 5.5E+06 | 1.5E+06 | 28% | 12% | 6 |
| K400A | K230A | 2.0E+07 | 3.1E+06 | 16% | 43% | 2 |
| K400E | K230E | 9.5E+06 | 1.1E+06 | 12% | 21% | 2 |
| K293E | K126E | 8.1E+06 | 5.4E+05 | 7% | 17% | 2 |
| K293A | K126A | 2.1E+07 | 4.4E+06 | 21% | 45% | 2 |
| R333A | R165A | 1.6E+05 | 1.1E+04 | 7% | 0% | 2 |
| R333E | R165E | 1.3E+04 | n.d. | n.d. | 0% | 1 |
| R338A | R170A | 1.6E+08 | 2.5E+07 | 15% | 350% | 2 |
| R338E | R170E | 1.8E+08 | 8.3E+07 | 45% | 396% | 10 |
| R338A/R403A | R170A/R233A | 5.3E+07 | 1.3E+07 | 24% | 115% | 6 |
| R338E/R403E | R170E/R233E | 6.2E+07 | 8.8E+06 | 14% | 134% | 2 |
| K293A/R403A | K126A/R233A | 5.7E+06 | 1.4E+06 | 25% | 12% | 2 |
| K293E/R403E | K126E/R233E | 1.3E+06 | 8.5E+04 | 6% | 3% | 2 |
| K293A/R338A/R403A | K126A/R170A/R233A | 2.5E+07 | 9.5E+06 | 39% | 53% | 2 |
| K293E/R338E/R403E | K126E/R170E/R233E | 1.7E+07 | 5.7E+05 | 3% | 36% | 2 |
| R318A/R403A | R150A/R233A | 1.5E+07 | 1.3E+06 | 9% | 32% | 2 |
| R318E/R403E | R150E/R233E | 1.2E+06 | 3.8E+05 | 33% | 3% | 2 |
| R318Y/E410N | R150Y/E240N | 7.5E+07 | 2.7E+07 | 35% | 163% | 21 |
| R338E/E410N | R170E/E240N | 4.4E+08 | 1.5E+08 | 33% | 950% | 12 |
| R338E/R403E/E410N | R170E/R233E/E240N | 1.9E+08 | 1.4E+08 | 72% | 411% | 17 |
| Y155F/R338E/R403E/ | Y[155]F/R170E/ | 1.8E+08 | 6.0E+07 | 32% | 401% | 2 |
| E410N | R233E/E240N | | | | | |
| R318Y/R338E/R403E | R150Y/R170E/R233E | 6.2E+07 | 6.3E+06 | 10% | 134% | 3 |
| Y155F/R318Y/R338E/ | Y[155]F/R150Y/ | 8.7E+07 | 5.1E+07 | 58% | 189% | 2 |
| R403E | R170E/R233E | | | | | |
| D203N/F205T/K228N | D39N/F41T/K63N | 1.4E+07 | 2.5E+06 | 18% | 30% | 2 |
| D203N/F205T/E410N | D39N/F41T/E240N | 4.2E+07 | 1.7E+07 | 40% | 91% | 6 |
| D203N/F205T/R338E | D39N/F41T/R170E | 1.0E+08 | 2.3E+07 | 22% | 228% | 2 |
| D203N/F205T/R338A | D39N/F41T/R170A | 6.2E+07 | 1.4E+07 | 22% | 135% | 3 |
| D203N/F205T/R318Y | D39N/F41T/R150Y | 2.0E+07 | 2.5E+06 | 12% | 44% | 4 |
| D203N/F205T/ | D39N/F41T/R170E/ | 1.9E+07 | 4.8E+06 | 25% | 41% | 2 |
| R338E/R403E | R233E | | | | | |
| K228N/E410N | K63N/E240N | 8.5E+07 | 3.4E+07 | 40% | 184% | 10 |
| K228N/R338E | K63N/R170E | 2.1E+08 | 6.1E+07 | 29% | 455% | 2 |
| K228N/R338A | K63N/R170A | 2.1E+08 | 4.6E+07 | 22% | 459% | 2 |
| K228N/R318Y | K63N/R150Y | 4.7E+07 | 6.5E+06 | 14% | 102% | 5 |
| K228N/R338E/R403E | K63N/R170E/R233E | 4.8E+07 | 8.6E+06 | 18% | 105% | 2 |
| R403E/E410N | R233E/E240N | 2.1E+07 | 1.7E+06 | 8% | 46% | 2 |
| R318Y/R338E/E410N | R150Y/R170E/E240N | 3.4E+08 | 1.2E+08 | 37% | 727% | 42 |
| D104N/K106S/R318Y/ | D[104]N/K[106]S/ | 2.6E+08 | 5.9E+07 | 23% | 564% | 4 |
| R338E/E410N | R150Y/R170E/E240N | | | | | |
| Y155F/R318Y/R338E/ | Y[155]F/R150Y/R170E/ | 3.7E+08 | 1.3E+08 | 33% | 810% | 5 |
| E410N | E240N | | | | | |
| K228N/R318Y/E410N | K63N/R150Y/E240N | 1.2E+08 | 2.6E+07 | 22% | 264% | 4 |
| R318Y/R403E/E410N | R150Y/R233E/E240N | 2.5E+07 | 4.7E+06 | 19% | 54% | 5 |
| Y155F/R318Y/R403E/ | Y[155]F/R150Y/R233E/ | 3.6E+07 | 2.9E+07 | 82% | 78% | 2 |
| E410N | E240N | | | | | |
| R318Y/R338E/R403E/ | R150Y/R170E/R233E/ | 1.5E+08 | 8.2E+07 | 56% | 320% | 26 |
| E410N | E240N | | | | | |
| A103N/N105S/R318Y/ | A[103]N/N[105]S/ | 1.5E+08 | 7.3E+07 | 50% | 318% | 5 |
| R338E/R403E/E410N | R150Y/R170E/R233E/E240N | | | | | |
| D104N/K106S/R318Y/ | D[104]N/K[106]S/ | 1.7E+08 | 7.9E+07 | 47% | 366% | 3 |
| R338E/R403E/E410N | R150Y/R170E/R233E/E240N | | | | | |
| Y155F/R318Y/R338E/ | Y[155]F/R150Y/R170E/ | 1.9E+08 | 5.0E+07 | 27% | 406% | 4 |
| R403E/E410N | R233E/E240N | | | | | |
| A103N/N105S/Y155F/ | A[103]N/N[105]S/ | 1.3E+08 | 1.8E+06 | 1% | 274% | 2 |
| R318Y/R338E/R403E/ | Y[155]F/R150Y/R170E/ | | | | | |
| E410N | R233E/E240N | | | | | |
| D104N/K106S/Y155F/ | D[104]N/K[106]S/ | 1.8E+08 | 9.1E+06 | 5% | 382% | 2 |
| R318Y/R338E/R403E/ | Y[155]F/R150Y/R170E/ | | | | | |
| E410N | R233E/E240N | | | | | |
| D203N/F205T/R318Y/ | D39N/F41T/R150Y/ | 3.9E+07 | 2.0E+07 | 52% | 85% | 6 |
| E410N | E240N | | | | | |
| R333S | R165S | 1.1E+05 | 5.5E+04 | 51% | 0% | 3 |
| R338L | R170L | 2.0E+08 | 2.3E+07 | 11% | 431% | 3 |
| K316N | K148N | 6.2E+06 | 4.2E+06 | 69% | 13% | 3 |
| K316A | K148A | 6.1E+06 | 8.2E+05 | 13% | 13% | 3 |
| K316E | K148E | 7.1E+05 | 1.4E+05 | 19% | 2% | 3 |
| K316S | K148S | 3.9E+06 | 6.2E+05 | 16% | 9% | 3 |
| K316M | K148M | 3.1E+07 | 1.4E+07 | 46% | 68% | 3 |
| E239S | E74S | 3.4E+07 | 1.8E+07 | 52% | 73% | 3 |
| E239A | E74A | 4.9E+07 | 6.2E+06 | 13% | 107% | 3 |
| E239R | E74R | 5.6E+07 | 1.1E+07 | 19% | 122% | 3 |
| E239K | E74K | 5.1E+07 | 5.1E+06 | 10% | 111% | 3 |
| H257F | H92F | 4.8E+07 | 6.6E+06 | 14% | 105% | 3 |
| H257Y | H92Y | 3.4E+07 | 9.1E+06 | 27% | 73% | 3 |
| H257E | H92E | 2.7E+07 | 1.5E+07 | 57% | 58% | 3 |
| H257S | H92S | 3.5E+07 | 1.3E+07 | 36% | 76% | 3 |
| T412A | T242A | 4.6E+07 | 2.8E+07 | 62% | 100% | 5 |
| T412V | T242V | 5.8E+07 | 3.2E+07 | 55% | 126% | 8 |
| E410N/T412A | E240N/T242A | 8.0E+07 | 1.7E+07 | 21% | 173% | 4 |
| E410N/T412V | E240N/T242V | 8.8E+07 | 2.7E+07 | 30% | 192% | 4 |
| E410Q | E240Q | 1.2E+08 | 7.6E+07 | 63% | 261% | 4 |
| E410S | E240S | 1.1E+08 | 6.6E+07 | 60% | 239% | 12 |
| E410A | E240A | 1.1E+08 | 5.6E+07 | 50% | 241% | 10 |
| E410D | E240D | 6.0E+07 | 1.6E+07 | 27% | 130% | 4 |
| N346D | N178D | 1.9E+07 | 8.5E+06 | 44% | 42% | 4 |
| Y155F/N346D | Y[155]F/N178D | 1.3E+07 | 6.8E+06 | 53% | 28% | 2 |
| N346Y | N178Y | 9.8E+07 | 2.3E+07 | 24% | 212% | 8 |
| Y345A | Y177A | 1.5E+07 | 6.3E+06 | 43% | 32% | 4 |
| Y345T | Y177T | 5.0E+07 | 2.5E+07 | 50% | 108% | 4 |
| T343R | T175R | 1.4E+08 | 1.0E+08 | 70% | 313% | 12 |
| T343E | T175E | 4.0E+07 | 2.3E+07 | 58% | 86% | 4 |
| T343Q | T175Q | 7.1E+07 | 2.2E+07 | 30% | 154% | 3 |
| F342I | F174I | 5.4E+07 | 2.9E+07 | 54% | 118% | 3 |
| T343R/Y345T | T175R/Y177T | 9.3E+07 | 1.8E+07 | 19% | 202% | 3 |
| R318Y/R338E | R150Y/R170E | 1.5E+08 | 5.3E+07 | 36% | 322% | 4 |
| Y259F/K265T/Y345T | Y94F/K98T/Y177T | 5.6E+07 | 1.2E+07 | 21% | 122% | 2 |
| K228N/I251S | K63N/I86S | 2.2E+07 | 5.7E+05 | 3% | 48% | 2 |
| K228N/R318Y/R338E/ | K63N/R150Y/R170E/ | 1.6E+08 | 6.1E+07 | 39% | 339% | 3 |
| R403E/E410N | R233E/E240N | | | | | |
| Y155F/K228N/R318Y/ | Y[155]F/K63N/R150Y/ | 1.6E+08 | 4.1E+07 | 25% | 356% | 5 |
| R338E/R403E/E410N | R170E/R233E/E240N | | | | | |
| D85N/K228N/R318Y/ | D[85]N/K63N/R150Y/ | 1.6E+08 | 2.3E+07 | 15% | 336% | 2 |
| R338E/R403E/E410N | R170E/R233E/E240N | | | | | |
| I251S/R318Y/R338E/ | I86S/R150Y/R170E/ | 1.5E+08 | 4.2E+07 | 27% | 334% | 4 |
| R403E/E410N | R233E/E240N | | | | | |
| D104N/K106S/I251S/ | D[104]N/K[106]S/ | 1.2E+08 | 2.0E+07 | 16% | 263% | 8 |
| R318Y/R338E/R403E/ | I86S/R150Y/R170E/R233E/ | | | | | |
| E410N | E240N | | | | | |
| Y155F/I251S/R318Y/ | D[104]N/K[106]S/ | 1.7E+08 | 9.2E+06 | 6% | 363% | 2 |
| R338E/R403E/E410N | I86S/R150Y/R170E/R233E/ | | | | | |
| | E240N | | | | | |
| I251S/R318Y/R338E/ | I86S/R150Y/R170E/ | 3.9E+08 | 7.4E+07 | 19% | 849% | 10 |
| E410N | E240N | | | | | |
| D104N/K106S/I25IS/ | D[104]N/K[106]S/ | 1.3E+08 | 3.2E+07 | 24% | 291% | 3 |
| R318Y/R338E/E410N | I86S/R150Y/R170E/E240N | | | | | |
| F314N/K316S | F145N/K148S | 8.8E+04 | 8.2E+04 | 94% | 0% | 2 |
| K247N/N249S/R318Y/ | K82N/N84S/R150Y/ | 1.5E+08 | 4.7E+07 | 30% | 331% | 6 |
| R338E/R403E/E410N | R170E/R233E/E240N | | | | | |
| Y155F/K247N/N249S/ | Y[155]F/K82N/N84S/ | 1.9E+08 | 5.7E+07 | 30% | 405% | 10 |
| R318Y/R338E/R403E/ | R150Y/R170E/R233E/E240N | | | | | |
| E410N | | | | | | |
| A103N/N105S/K247N/ | A[103]N/N[105]S/ | 1.5E+08 | 4.2E+07 | 28% | 324% | 6 |
| N249S/R318Y/R338E/ | K82N/N84S/R150Y/R170E/ | | | | | |
| R403E/E410N | R233E/E240N | | | | | |
| D104N/K106S/K247N/ | D[104]N/K[106]S/ | 8.8E+07 | 6.5E+06 | 7% | 192% | 2 |
| N249S/R318Y/R338E/ | K82N/N84S/R150Y/R170E/ | | | | | |
| R403E/E410N | R233E/E240N | | | | | |
| D104N/K106S/Y155F/ | D[104]N/K[106]S/ | 1.3E+08 | 7.3E+07 | 54% | 292% | 6 |
| K247N/N249S/R318Y/ | Y[155]F/K82N/N84S/R150Y/ | | | | | |
| R338E/R403E/E410N | R170E/R233E/E240N | | | | | |
| K247N/N249S/R318Y/ | K82N/N84S/R150Y/ | 2.3E+08 | 6.6E+07 | 28% | 501% | 6 |
| R338E/E410N | R170E/E240N | | | | | |
| Y155F/K247N/N249S/ | Y[155]F/K82N/N84S/ | 3.3E+08 | 1.3E+08 | 39% | 717% | 9 |
| R318Y/R338E/E410N | R150Y/R170E/E240N | | | | | |
| R318Y/R338E/R403E/ | R150Y/R170E/R233E/ | 2.1E+08 | 6.1E+07 | 29% | 458% | 7 |
| E410S | E240S | | | | | |
| R318Y/R338E/E410S | R150Y/R170E/E240S | 3.3E+08 | 1.2E+08 | 37% | 708% | 8 |
| K228N/K247N/N249S | K63N/K82N/N84S | 3.8E+07 | 1.2E+07 | 32% | 83% | 2 |
| D104N/K106S/Y155F/ | D[104]N/K[106]S/ | 6.3E+07 | 3.3E+06 | 5% | 137% | 2 |
| K228N/K247N/N249S | Y[155]F/K63N/K82N/N84S | | | | | |
| D104N/K106S/K228N/ | D[104]N/K[106]S/ | 2.3E+07 | 1.1E+07 | 48% | 49% | 5 |
| K247N/N249S | K63N/K82N/N84S | | | | | |
| Y155F/K228N/K247N/ | Y[155]F/K63N/K82N/ | 5.3E+07 | 5.5E+06 | 10% | 115% | 2 |
| N249S | N84S | | | | | |
| K228N/K247N/N249S/ | K63N/K82N/N84S/R150Y/ | 1.6E+08 | 8.4E+07 | 51% | 352% | 17 |
| R318Y/R338E/R403E/ | R170E/R233E/E240N | | | | | |
| E410N | | | | | | |
| D104N/K106S/K228N/ | D[104]N/K[106]S/ | 1.1E+08 | 4.4E+07 | 40% | 239% | 7 |
| K247N/N249S/R318Y/ | K63N/K82N/N84S/R150Y/R170E/ | | | | | |
| R338E/R403E/E410N | R233E/E240N | | | | | |
| Y155F/K228N/K247N/ | Y[155]F/K63N/K82N/N84S/ | 1.2E+08 | 5.3E+07 | 44% | 263% | 5 |
| N249S/R318Y/R338E/ | R150Y/R170E/R233E/E240N | | | | | |
| R403E/E410N | | | | | | |
| R318Y/R338E/R403E/ | R150Y/R170E/R233E/ | 1.6E+08 | 6.3E+07 | 40% | 342% | 6 |
| E410N/T412V | E240N/T242V | | | | | |
| R318Y/R338E/R403E/ | R150Y/R170E/R233E/ | 2.5E+08 | 9.2E+07 | 37% | 538% | 6 |
| E410N/T412A | E240N/T242A | | | | | |
| R318Y/R338E/R403E/ | R150Y/R170E/R233E/ | 8.0E+07 | 3.4E+07 | 42% | 173% | 4 |
| T412A | T242A | | | | | |
| R318Y/R338E/T412A | R150Y/R170E/T242A | 3.0E+08 | 8.3E+07 | 28% | 642% | 6 |
| R318Y/R338E/E410N/ | R150Y/R170E/E240N/ | 2.6E+08 | 1.2E+08 | 46% | 571% | 11 |
| T412V | T242V | | | | | |
| N260S/R318Y/R338E/ | N95S/R150Y/R170E/ | 5.3E+07 | 6.6E+05 | 1% | 114% | 2 |
| R403E/E410N | R233E/E240N | | | | | |
| D104N/K106S/N260S/ | D[104]N/K[106]S/ | 8.8E+07 | 7.9E+06 | 9% | 190% | 2 |
| R318Y/R338E/R403E/ | N95S/R150Y/R170E/R233E/ | | | | | |
| E410N | E240N | | | | | |
| Y155F/N260S/R318Y/ | Y[155]F/N95S/R150Y/ | 7.0E+07 | 2.4E+07 | 35% | 152% | 2 |
| R338E/R403E/E410N | R170E/R233E/E240N | | | | | |
| R318Y/R338E/N346D/ | R150Y/R170E/N178D/ | 3.1E+07 | 9.1E+06 | 30% | 66% | 2 |
| R403E/E410N | R233E/E240N | | | | | |
| Y155F/R318Y/R338E/ | Y[155]F/R150Y/R170E/ | 6.2E+07 | 1.8E+07 | 30% | 135% | 2 |
| N346D/R403E/E410N | N178D/R233E/E240N | | | | | |
| K247N/N249S/N260S | K82N/N84S/N95S | 2.9E+07 | 2.6E+06 | 9% | 62% | 2 |
| Y155F/K247N/N249S/ | Y[155]F/K82N/N84S/ | 1.9E+07 | 4.2E+06 | 22% | 42% | 2 |
| N260S | N95S | | | | | |
| D104N/K106S/K247N/ | D[104]N/K[106]S/ | 9.8E+06 | 3.0E+06 | 30% | 21% | 2 |
| N249S/N260S | K82N/N84S/N95S | | | | | |
| D104N/K106S/Y155F/ | D[104]N/K[106]S/ | 8.2E+06 | 3.9E+06 | 47% | 18% | 2 |
| K247N/N249S/N260S | Y[155]F/K82N/N84S/N95S | | | | | |
| K247N/N249S/N260S/ | K82N/N84S/N95S/R150Y/ | 6.7E+07 | 2.6E+07 | 38% | 145% | 6 |
| R318Y/R338E/R403E/ | R170E/R233E/E240N | | | | | |
| E410N | | | | | | |
| Y155F/K247N/N249S/ | Y[155]F/K82N/N84S/N95S/ | 5.7E+07 | 3.6E+07 | 64% | 124% | 5 |
| N260S/R318Y/R338E/ | R150Y/R170E/R233E/E240N | | | | | |
| R403E/E410N | | | | | | |
| Y155F/N260S/N346D | Y[155]F/N95S/N178D | 2.2E+06 | 7.4E+05 | 34% | 5% | 2 |
| R318Y/R338E/T343R/ | R150Y/R170E/T175R/ | 4.2E+08 | 1.4E+08 | 33% | 907% | 13 |
| R403E/E410N | R233E/E240N | | | | | |
| Y155F/R318Y/R338E/ | Y[155]F/R150Y/R170E/ | 3.0E+08 | 8.3E+07 | 28% | 640% | 4 |
| T343R/R403E/E410N | T175R/R233E/E240N | | | | | |
| D104N/K106S/R318Y/ | D[104]N/K[106]S/ | 2.2E+08 | 1.2E+08 | 52% | 487% | 5 |
| R338E/T343R/R403E/ | R150Y/R170E/T175R/R233E/ | | | | | |
| E410N | E240N | | | | | |
| R338E/T343R | R170E/T175R | 5.2E+08 | 1.6E+08 | 31% | 1120% | 7 |
| T343R/N346Y | T175R/N178Y | 9.6E+07 | 4.4E+07 | 46% | 208% | 11 |
| R318Y/R338E/N346Y/ | R150Y/R170E/N178Y/ | 1.2E+08 | 2.1E+07 | 16% | 270% | 3 |
| R403E/E410N | R233E/E240N | | | | | |
| R318Y/R338E/T343R/ | R150Y/R170E/T175R/ | 3.1E+08 | 1.1E+08 | 37% | 663% | 5 |
| N346Y/R403E/E410N | N178Y/R233E/E240N | | | | | |
| T343R/N346D | T175R/N178D | 1.6E+07 | 2.6E+06 | 16% | 36% | 2 |
| R318Y/R338E/T343R/ | R150Y/R170E/T175R/ | 8.2E+07 | 3.2E+06 | 4% | 177% | 2 |
| N346D/R403E/E410N | N178D/R233E/E240N | | | | | |
| R318Y/R338E/Y345A/ | R150Y/R170E/Y177A/ | 8.3E+07 | 3.6E+07 | 44% | 180% | 6 |
| R403E/E410N | R233E/E240N | | | | | |
| R318Y/R338E/Y345A/ | R150Y/R170E/Y177A/ | 2.3E+07 | 7.6E+06 | 33% | 49% | 3 |
| N346D/R403E/E410N | N178D/R233E/E240N | | | | | |
| Y155F/K247N/N249S/ | Y[155]F/K82N/N84S/ | 9.5E+07 | 6.6E+07 | 69% | 206% | 5 |
| R318Y/R338E/R403E | R150Y/R170E/R233E | | | | | |
| K247N/N249S/R318Y/ | K82N/N84S/R150Y/ | 2.3E+08 | 1.6E+08 | 71% | 496% | 2 |
| R338E/R403E | R170E/R233E | | | | | |
| Y155F/K247N/N249S/ | Y[155]F/K82N/N84S/ | 1.0E+07 | 4.5E+06 | 45% | 22% | 3 |
| R318Y/R403E/E410N | R150Y/R233E/E240N | | | | | |
| K247N/N249S/R318Y/ | K82N/N84S/R150Y/R233E/ | 2.7E+07 | 1.2E+07 | 44% | 58% | 10 |
| R403E/E410N | E240N | | | | | |
| Y155F/K247N/N249S/ | Y[155]F/K82N/N84S/ | 1.1E+08 | 2.4E+07 | 23% | 229% | 3 |
| R338E/R403E/E410N | R170E/R233E/E240N | | | | | |
| K247N/N249S/R338E/ | K82N/N84S/R170E/ | 1.9E+08 | 2.9E+07 | 15% | 422% | 2 |
| R403E/E410N | R233E/E240N | | | | | |
| R318Y/R338E/T343R/ | R150Y/R170E/T175R/ | 1.6E+08 | 7.4E+07 | 45% | 357% | 4 |
| R403E | R233E | | | | | |
| Y155F/R318Y/R338E/ | Y[155]F/R150Y/R170E/ | 2.6E+08 | 1.7E+08 | 65% | 563% | 4 |
| T343R/R403E | T175R/R233E | | | | | |
| R318Y/R338E/T343R/ | R150Y/R170E/T175R/ | 3.4E+08 | 1.6E+08 | 48% | 728% | 16 |
| E410N | E240N | | | | | |
| Y155F/R318Y/R338E/ | Y[155]F/R150Y/R170E/ | 3.7E+08 | 1.2E+08 | 32% | 794% | 4 |
| T343R/E410N | T175R/E240N | | | | | |
| R318Y/T343R/R403E/ | R150Y/T175R/R233E/ | 5.8E+07 | 1.8E+07 | 31% | 125% | 3 |
| E410N | E240N | | | | | |
| Y155F/R318Y/T343R/ | Y[155]F/R150Y/T175R/ | 2.6E+08 | 5.0E+07 | 19% | 571% | 2 |
| R403E/E410N | R233E/E240N | | | | | |
| R338E/T343R/R403E/ | R170E/T175R/R233E/ | 3.0E+08 | 8.2E+07 | 27% | 650% | 2 |
| E410N | E240N | | | | | |
| Y155F/R338E/T343R/ | Y[155]F/R170E/T175R/ | 2.4E+08 | 1.0E+08 | 42% | 524% | 4 |
| R403E/E410N | R233E/E240N | | | | | |
| Y155F/K247N/N249S/ | Y[155]F/K82N/N84S/ | 4.0E+08 | 1.5E+08 | 37% | 864% | 11 |
| R318Y/R338E/T343R/ | R150Y/R170E/T175R/ | | | | | |
| R403E/E410N | R233E/E240N | | | | | |
| K247N/N249S/R318Y/ | K82N/N84S/R150Y/R170E/ | 3.8E+08 | 1.5E+08 | 40% | 824% | 5 |
| R338E/T343R/R403E/ | T175R/R233E/E240N | | | | | |
| E410N | | | | | | |
| K228N/I251S/R318Y/ | K63N/I86S/R150Y/R170E/ | 2.1E+08 | 7.2E+07 | 34% | 463% | 7 |
| R338E/R403E/E410N | R233E/E240N | | | | | |
| Y155F/K228N/I251S/ | Y[155]F/K63N/ | 1.4E+08 | 5.0E+07 | 37% | 296% | 5 |
| R318Y/R338E/ | I86S/R150Y/R170E/ | | | | | |
| R403E/E410N | R233E/E240N | | | | | |
| N260S/R318Y/R338E/ | N95S/R150Y/R170E/T175R/ | 2.9E+08 | 1.1E+08 | 38% | 638% | 7 |
| T343R/R403E/E410N | R233E/E240N | | | | | |
| Y155F/N260S/R318Y/ | Y[155]F/N95S/R150Y/ | 1.5E+08 | 6.0E+07 | 39% | 335% | 5 |
| R338E/T343R/R403E/ | R170E/T175R/R233E/ | | | | | |
| E410N | E240N | | | | | |
| K228N/K247N/N249S/ | K63N/K82N/N84S/R150Y/ | 4.1E+08 | 1.4E+08 | 34% | 880% | 12 |
| R318Y/R338E/T343R/ | R170E/T175R/R233E/ | | | | | |
| R403E/E410N | E240N | | | | | |
| Y155F/K228N/K247N/ | Y[155]F/K63N/ | 3.0E+08 | 1.1E+08 | 37% | 646% | 5 |
| N249S/R318Y/R338E/ | K82N/N84S/R150Y/R170E/ | | | | | |
| T343R/R403E/E410N | T175R/R233E/E240N | | | | | |
| Y155F/R338E/T343R/ | Y[155]F/R170E/T175R/ | 2.0E+08 | 7.7E+07 | 39% | 429% | 5 |
| R403E | R233E | | | | | |
| R338E/T343R/R403E | R170E/T175R/R233E | 3.1E+08 | 9.6E+07 | 31% | 663% | 2 |
| Y155F/R338E/T343R/ | Y[155]F/R170E/T175R/ | 2.9E+08 | 1.0E+08 | 35% | 629% | 6 |
| R403E/E410S | R233E/E240S | | | | | |
| Y155F/N260S/R338E/ | Y[155]F/N95S/R170E/ | 9.4E+07 | 3.1E+07 | 33% | 203% | 6 |
| T343R/R403E | T175R/R233E | | | | | |
| Y155F/I251S/R338E/ | Y[155]F/I86S/R170E/ | 3.0E+08 | 1.6E+07 | 5% | 651% | 2 |
| T343R/R403E | T175R/R233E | | | | | |
| R318Y/R338E/T343R/ | R150Y/R170E/T175R/ | 4.4E+08 | 1.7E+08 | 39% | 962% | 14 |
| R403E/E410S | R233E/E240S | | | | | |
| Y155F/K247N/N249S/ | Y[155]F/K82N/N84S/ | 8.5E+07 | 2.7E+07 | 31% | 184% | 4 |
| T343R/R403E | T175R/R233E | | | | | |
| Y155F/K247N/N249S/ | Y[155]F/K82N/N84S/ | 2.9E+08 | 5.0E+06 | 2% | 630% | 2 |
| R318Y/R338E/ | R150Y/R170E/T175R/ | | | | | |
| T343R/R403E | R233E | | | | | |
| K247N/N249S/R318Y/ | K82N/N84S/R150Y/ | 4.1E+08 | 2.2E+08 | 55% | 886% | 4 |
| R338E/T343R/R403E | R170E/T175R/R233E | | | | | |
| Y155F/K247N/N249S/ | Y[155]F/K82N/N84S/ | 3.7E+08 | 1.1E+07 | 3% | 805% | 2 |
| R338E/T343R/R403E/ | R170E/T175R/R233E/ | | | | | |
| E410N | E240N | | | | | |
| K247N/N249S/R338E/ | K82N/N84S/R170E/ | 4.3E+08 | 1.2E+07 | 3% | 930% | 2 |
| T343R/R403E/E410N | T175R/R233E/E240N | | | | | |
| Y155F/K247N/N249S/ | Y[155]F/K82N/N84S/ | 2.9E+08 | 4.1E+07 | 14% | 632% | 2 |
| R318Y/R338E | R150Y/R170E | | | | | |
| Y155F/K247N/N249S/ | Y[155]F/K82N/N84S/ | 2.5E+08 | 9.4E+07 | 37% | 549% | 4 |
| R318Y/T343R | R150Y/T175R | | | | | |
| Y155F/K247N/N249S/ | Y[155]F/K82N/N84S/ | 1.6E+07 | 5.4E+06 | 35% | 34% | 3 |
| R318Y/R403E | R150Y/R233E | | | | | |
| Y155F/K247N/N249S/ | Y[155]F/K82N/N84S/ | 7.2E+07 | 2.5E+07 | 35% | 155% | 3 |
| R318Y/E410N | R150Y/E240N | | | | | |
| Y155F/K247N/N249S/ | Y[155]F/K82N/N84S/ | 1.4E+08 | 5.7E+07 | 41% | 299% | 2 |
| R338E/R403E | R170E/R233E | | | | | |
| Y155F/K247N/N249S/ | Y[155]F/K82N/N84S/ | 7.3E+08 | 2.6E+08 | 36% | 1579% | 2 |
| R338E/T343R | R170E/T175R | | | | | |
| Y155F/K247N/N249S/ | Y[155]F/K82N/N84S/ | 5.0E+08 | 2.8E+08 | 57% | 1091% | 4 |
| R318Y/R338E/T343R/ | R150Y/R170E/T175R/ | | | | | |
| E410N | E240N | | | | | |
| K247N/N249S/R318Y/ | K82N/N84S/R150Y/ | 3.2E+08 | 1.6E+08 | 50% | 687% | 6 |
| R338E/T343R/E410N | R170E/T175R/E240N | | | | | |
| Y155F/K247N/N249S/ | Y[155]F/K82N/N84S/ | 1.6E+08 | 6.2E+07 | 38% | 350% | 2 |
| R318Y/T343R/R403E/ | R150Y/T175R/R233E/ | | | | | |
| E410N | E240N | | | | | |
| K247N/N249S/R318Y/ | K82N/N84S/R150Y/ | 1.3E+08 | 3.9E+07 | 30% | 279% | 7 |
| | T175R/R233E/E240N | | | | | |
| T343R/R403E/E410N | | | | | | |
| Y155F/K247N/N249S/ | Y[155]F/K82N/N84S/ | 4.7E+08 | 3.1E+08 | 66% | 1009% | 8 |
| R338E/E410N | R170E/E240N | | | | | |
| Y155F/K247N/N249S/ | Y[155]F/K82N/N84S/ | 1.3E+08 | 5.1E+07 | 40% | 276% | 2 |
| R318Y/T343R/R403E | R150Y/T175R/R233E | | | | | |
| K247N/N249S/R318Y/ | K82N/N84S/R150Y/ | 3.9E+07 | 2.2E+07 | 57% | 84% | 9 |
| T343R/R403E | T175R/R233E | | | | | |
| Y155F/K247N/N249S/ | Y[155]F/K82N/N84S/ | 3.1E+08 | 2.1E+08 | 67% | 668% | 4 |
| R318Y/T343R/E410N | R150Y/T175R/E240N | | | | | |
| K247N/N249S/R318Y/ | K82N/N84S/R150Y/ | 2.0E+08 | 1.6E+08 | 77% | 439% | 4 |
| T343R/E410N | T175R/E240N | | | | | |
| Y155F/K247N/N249S/ | Y[155]F/K82N/N84S/ | 5.9E+08 | 5.8E+07 | 10% | 1269% | 2 |
| R338E/T343R/R403E | R170E/T175R/R233E | | | | | |
| K247N/N249S/R338E/ | K82N/N84S/R170E/ | 5.6E+08 | 8.8E+07 | 16% | 1215% | 2 |
| T343R/R403E | T175R/R233E | | | | | |
| Y155F/K247N/N249S/ | Y[155]F/K82N/N84S/ | 1.8E+08 | 1.1E+07 | 6% | 391% | 2 |
| R338E/T343R/E410N | R170E/T175R/E240N | | | | | |
| K247N/N249S/R338E/ | K82N/N84S/R170E/ | 3.1E+08 | 1.0E+08 | 33% | 676% | 5 |
| T343R/E410N | T175R/E240N | | | | | |
| Y155F/K247N/N249S/ | Y[155]F/K82N/N84S/ | 2.9E+08 | 8.8E+07 | 30% | 635% | 2 |
| T343R/R403E/E410N | T175R/R233E/E240N | | | | | |
| K247N/N249S/T34 | K82N/N84S/T175R/ | 1.3E+08 | 1.7E+07 | 13% | 285% | 2 |
| 3R/R403E/E410N | R233E/E240N | | | | | |
| Y155F/R318Y/R338E/ | Y[155]F/R150Y/ | 3.6E+08 | 1.5E+08 | 41% | 771% | 7 |
| T343R | R170E/T175R | | | | | |
| R318Y/R338E/T343R | R150Y/R170E/T175R | 1.5E+08 | 3.3E+07 | 22% | 324% | 2 |
| Y155F/R318Y/T343R/ | Y[155]F/R150Y/T175R/ | 7.1E+07 | 1.4E+07 | 20% | 154% | 2 |
| R403E | R233E | | | | | |
| Y155F/T343R/R403E/ | Y[155]F/T175R/R233E/ | 1.5E+08 | 2.4E+07 | 17% | 321% | 2 |
| E410N | E240N | | | | | |
| Y155F/K247N/N249S/ | Y[155]F/K82N/N84S/ | 3.6E+08 | 1.6E+08 | 45% | 772% | 7 |
| R318Y/R338E/T343R | R150Y/R170E/T175R | | | | | |
| K247N/N249S/R318Y/ | K82N/N84S/R150Y/ | 3.9E+08 | 1.6E+08 | 43% | 840% | 4 |
| R338E/T343R | R170E/T175R | | | | | |
| Y155F/K247N/N249S/ | Y[155]F/K82N/N84S/ | 2.8E+08 | 1.1E+08 | 38% | 599% | 5 |
| T343R/E410N | T175R/E240N | | | | | |
| Y155F/K247N/N249S/ | Y[155]F/K82N/N84S/ | 2.4E+07 | 1.4E+07 | 59% | 53% | 7 |
| R403E/E410N | R233E/E240N | | | | | |
| Y155F/R338E/T343R/ | Y[155]F/R170E/T175R/ | 3.5E+08 | 2.2E+08 | 62% | 761% | 6 |
| E410N | E240N | | | | | |
| R338E/T343R/E410N | R170E/T175R/E240N | 9.3E+07 | 2.8E+07 | 30% | 201% | 2 |
| Y155F/R318Y/T343R/ | Y[155]F/R150Y/T175R/ | 1.5E+08 | 6.6E+07 | 44% | 326% | 4 |
| E410N | E240N | | | | | |
| R318Y/T343R/E410N | R150Y/T175R/E240N | 6.2E+07 | 1.1E+07 | 17% | 135% | 2 |
| K228N/R318Y/R338E/ | K63N/R150Y/R170E/ | 2.7E+08 | 8.8E+07 | 32% | 593% | 3 |
| T343R/R403E/E410N | T175R/R233E/E240N | | | | | |
| K228N/K247N/N249S/ | K63N/K82N/N84S/R150Y/ | 2.9E+08 | 1.3E+08 | 46% | 636% | 3 |
| R318Y/R338E/T343R/ | R170E/T175R/R233E | | | | | |
| R403E | | | | | | |
| K228N/247N/N249S/ | K63N/K82N/N84S/R150Y/ | 1.3E+08 | 4.5E+07 | 35% | 278% | 2 |
| R318Y/R338E/ | R170E/T175R/E240N | | | | | |
| T343R/E410N | | | | | | |
| K228N/K247N/N249S/ | K63N/K82N/N84S/R150Y/ | 7.1E+07 | 3.3E+07 | 46% | 153% | 3 |
| R318Y/T343R/R403E/ | T175R/R233E/E240N | | | | | |
| E410N | | | | | | |

†produced in BHK-21 cells;
*80% glycosylated form of E410N

TABLE 25
Catalytic activity of FIXa variants (k_{cat})

| Mutation | Mutation | | | | |
|---|---|---|---|---|---|
| (Mature FIX | (Chymotrypsin | k_{cat} | ±S.D. | | |
| Numbering) | Numbering) | (s⁻¹) | (s⁻¹) | % CV | n |
| BeneFIX ® | BeneFIX ® | 2.8 | 1.1 | 39% | 125 |
| Coagulation FIX | Coagulation FIX | | | | |
| (T148A) | (T[148]A) | | | | |
| Plasma Purified | Plasma Purified | 3.6 | 1.2 | 34% | 120 |
| FIXa | FIXa | | | | |
| Catalyst | Catalyst | 3.1 | 1.4 | 46% | 31 |
| Biosciences WT | Biosciences WT | | | | |
| N157D | N[157]D | 3.3 | 0.5 | 16% | 2 |
| Y155F | Y[155]F | 3.7 | 0.4 | 11% | 2 |
| A103N/N105S/Y155F | A[103]N/N[105]S/ | 3.2 | 0.0 | 0% | 2 |
| | Y[155]F | | | | |
| D104N/K106S/Y155F | D[104]N/K[106]S/ | 2.9 | 0.1 | 4% | 2 |
| | Y[155]F | | | | |
| A103N/N105S | A[103]N/N[105]S | 3.1 | 1.0 | 31% | 9 |
| D104N/K106S | D[104]N/K[106]S | 3.1 | 1.1 | 34% | 9 |
| K106N/V108S | K[106]N/V[108]S | 2.5 | 0.5 | 21% | 7 |
| D85N | D[85]N | 4.2 | 0.8 | 19% | 15 |
| T148A | T[148]A | 2.2 | 0.9 | 42% | 30 |
| T148A† | T[148]A† | 1.6 | 0.2 | 14% | 7 |
| K5A | K[5]A | 3.1 | 0.2 | 8% | 2 |
| D64N | D[64]N | 1.2 | 0.4 | 31% | 2 |
| D64A | D[64]A | 0.3 | 0.2 | 70% | 2 |
| N167D | N[167]D | 2.9 | 0.8 | 27% | 2 |
| N167Q | N[167]Q | 2.3 | 0.7 | 32% | 4 |
| S61A | S[61]A | 3.6 | 1.5 | 41% | 4 |
| S53A | S[53]A | 3.7 | 1.7 | 44% | 3 |
| T159A | T[159]A | 3.7 | 1.2 | 34% | 3 |
| T169A | T[169]A | 4.6 | 1.6 | 36% | 3 |
| T172A | T[172]A | 4.4 | 1.5 | 34% | 3 |
| T179A | T[179]A | 5.1 | 0.6 | 12% | 3 |
| Y155H | Y[155]H | 4.6 | 0.9 | 18% | 3 |
| Y155Q | Y[155]Q | 4.4 | 1.0 | 24% | 3 |
| S158A | S[158]A | 3.9 | 0.1 | 3% | 2 |
| S158D | S[158]D | 3.5 | 0.3 | 8% | 2 |
| S158E | S[158]E | 3.5 | 0.2 | 5% | 2 |
| N157Q | N[157]Q | 3.5 | 0.1 | 4% | 2 |
| D203N/F205T | D39N/F41T | 1.6 | 0.6 | 40% | 12 |
| D85N/D203N/F205T | D[85]N/D39N/F41T | 1.2 | 0.5 | 40% | 5 |
| K228N | K63N | 2.7 | 1.2 | 43% | 13 |
| D85N/K228N | D[85]N/K63N | 2.7 | 0.8 | 29% | 6 |
| A103N/N105S/K228N | A[103]N/N[105]S/ | 2.1 | 0.5 | 22% | 3 |
| | K63N | | | | |
| D104N/K106S/K228N | D[104]N/K[106]S/ | 2.4 | 0.1 | 6% | 3 |
| | K63N | | | | |
| Y155F/K228N | Y[155]F/K63N | 3.3 | 0.3 | 10% | 2 |
| D104N/K106S/Y155F/ | D[104]N/K[106]S/ | 4.6 | 1.2 | 27% | 2 |
| K228N | Y[155]F/K63N | | | | |
| I251S | I86S | 3.8 | 1.1 | 30% | 13 |
| D85N/I251S | D[85]N/I86S | 2.8 | 0.6 | 22% | 5 |
| D85N/D104N/K106S/ | D[85]N/D[104]N/ | 1.5 | 0.3 | 19% | 5 |
| I251S | K[106]S/I86S | | | | |
| A103N/N105S/I251S | A[103]N/N[105]S/ | 2.9 | 1.0 | 36% | 3 |
| | I86S | | | | |
| D104N/K106S/I251S | D[104]N/K[106]S/ | 2.9 | 0.5 | 18% | 2 |
| | I86S | | | | |
| Y155F/I251S | Y[155]F/I86S | 3.7 | 0.8 | 22% | 2 |
| A262S | A95bS | 2.3 | 0.7 | 32% | 8 |
| K413N | K243N | 2.6 | 0.5 | 19% | 5 |
| E410N | E240N | 5.0 | 2.2 | 45% | 21 |
| E410N* | E240N* | 2.2 | 0.5 | 25% | 11 |
| E239N | E74N | 1.4 | 0.5 | 36% | 9 |
| T241N/H243S | T76N/H78S | 2.0 | 0.0 | 0% | 2 |
| K247N/N249S | K82N/N84S | 3.9 | 1.0 | 26% | 11 |
| Y155F/K247N/N249S | Y[155]F/K82N/N84S | 3.3 | 0.7 | 21% | 4 |
| A103N/N105S/K247N/ | A[103]N/N[105]S/ | 3.4 | 0.5 | 15% | 6 |
| N249S | K82N/N84S | | | | |
| D104N/K106S/K247N/ | D[104]N/K[106]S/ | 3.3 | 1.1 | 32% | 2 |
| N249S | K82N/N84S | | | | |
| D104N/K106S/Y155F/ | D[104]N/K[106]S/ | 2.8 | 1.1 | 40% | 3 |
| K247N/N249S | Y[155]F/K82N/N84S | | | | |
| L321N | L153N | 1.9 | 0.1 | 4% | 2 |
| F314N/H315S | F145N/H147S | No | n.d. | n.d. | 4 |
| | | Activity | | | |
| S319N/L321S | S151N/L153S | 1.4 | 0.9 | 61% | 3 |
| N260S | N95S | 1.3 | 0.5 | 42% | 13 |
| D104N/K106S/N260S | D[104]N/K[106]S/ | 1.2 | 0.7 | 58% | 2 |
| | N95S | | | | |
| Y155F/N260S | Y[155]F/N95S | 1.9 | 0.6 | 32% | 2 |
| D104N/K106S/Y155F/ | D[104]N/K[106]S/ | 0.4 | 0.1 | 28% | 2 |
| N260S | Y[155]F/N95S | | | | |
| Y284N | Y117N | 2.0 | 0.9 | 45% | 8 |
| G317N | G149N | No | n.d. | n.d. | 5 |
| | | Activity | | | |
| R318N/A320S | R150N/A152S | No | n.d. | n.d. | 8 |
| | | Activity | | | |
| R318A | R150A | 2.4 | 0.8 | 32% | 3 |
| R318E | R150E | 0.6 | 0.2 | 35% | 3 |
| R318Y | R150Y | 2.9 | 0.7 | 26% | 3 |
| R312Q | R143Q | 0.3 | 0.1 | 26% | 3 |
| R312A | R143A | 0.3 | 0.0 | 8% | 2 |
| R312Y | R143Y | 0.4 | 0.3 | 73% | 2 |
| R312L | R143L | 0.7 | 0.3 | 41% | 2 |
| V202M | V38M | 2.6 | 1.0 | 37% | 2 |
| V202Y | V38Y | 1.8 | 0.2 | 10% | 2 |
| D203M | D39M | 1.8 | 0.8 | 42% | 5 |
| D203Y | D39Y | 1.7 | 0.5 | 27% | 4 |
| A204M | A40M | 0.6 | 0.5 | 84% | 5 |
| A204Y | A40Y | 1.9 | 0.8 | 42% | 2 |
| K400A/R403A | K230A/R233A | 0.3 | 0.0 | 5% | 2 |
| K400E/R403E | K230E/R233E | No | n.d. | n.d. | 4 |
| | | Activity | | | |
| R403A | R233A | 0.6 | 0.2 | 24% | 7 |
| R403E | R233E | 0.4 | 0.1 | 25% | 6 |
| K400A | K230A | 1.4 | 0.2 | 14% | 2 |
| K400E | K230E | 0.6 | 0.0 | 4% | 2 |
| K293E | K126E | 0.5 | 0.1 | 15% | 2 |
| K293A | K126A | 1.4 | 0.4 | 28% | 2 |
| R333A | R165A | No | n.d. | n.d. | 2 |
| | | Activity | | | |
| R333E | R165E | No | n.d. | n.d. | 2 |
| | | Activity | | | |
| R338A | R170A | 5.4 | 0.3 | 5% | 2 |
| R338E | R170E | 4.7 | 1.0 | 21% | 10 |
| R338A/R403A | R170A/R233A | 3.8 | 0.9 | 24% | 6 |
| R338E/R403E | R170E/R233E | 3.3 | 1.2 | 37% | 2 |
| K293A/R403A | K126A/R233A | 0.4 | 0.0 | 9% | 2 |
| K293E/R403E | K126E/R233E | 0.1 | 0.0 | 37% | 2 |
| K293A/R338A/R403A | K126A/R170A/R233A | 1.6 | 0.7 | 41% | 2 |
| K293E/R338E/R403E | K126E/R170E/R233E | 0.8 | 0.2 | 27% | 2 |
| R318A/R403A | R150A/R233A | 0.7 | 0.1 | 12% | 2 |
| R318E/R403E | R150E/R233E | 0.1 | 0.0 | 35% | 2 |
| R318Y/E410N | R150Y/E240N | 3.5 | 0.9 | 27% | 21 |
| R338E/E410N | R170E/E240N | 5.2 | 0.8 | 16% | 8 |
| R338E/R403E/E410N | R170E/R233E/E240N | 3.3 | 1.3 | 39% | 7 |
| R318Y/R338E/R403E | R150Y/R170E/R233E | 3.5 | 0.4 | 11% | 2 |
| D203N/F205T/K228N | D39N/F41T/K63N | 0.6 | 0.2 | 27% | 2 |
| D203N/F205T/E410N | D39N/F41T/E240N | 1.7 | 0.3 | 16% | 6 |
| D203N/F205T/R338E | D39N/F41T/R170E | 2.5 | 0.0 | 2% | 2 |
| D203N/F205T/R338A | D39N/F41T/R170A | 2.3 | 0.5 | 23% | 3 |
| D203N/F205T/R318Y | D39N/F41T/R150Y | 0.9 | 0.1 | 13% | 4 |
| D203N/F205T/R338E/ | D39N/F41T/R170E/ | 0.9 | 0.0 | 5% | 2 |
| R403E | R233E | | | | |
| K228N/E410N | K63N/E240N | 3.5 | 0.9 | 27% | 10 |
| K228N/R338E | K63N/R170E | 4.8 | 0.8 | 17% | 2 |
| K228N/R338A | K63N/R170A | 6.5 | 0.5 | 7% | 2 |
| K228N/R318Y | K63N/R150Y | 2.9 | 0.6 | 19% | 5 |
| K228N/R338E/R403E | K63N/R170E/R233E | 2.8 | 0.3 | 9% | 2 |
| R403E/E410N | R233E/E240N | 2.0 | 0.2 | 9% | 2 |
| R318Y/R338E/E410N | R150Y/R170E/E240N | 4.6 | 1.3 | 29% | 26 |
| D104N/K106S/R318Y/ | D[104]N/K[106]S/ | 4.8 | 0.6 | 12% | 4 |
| R338E/E410N | R150Y/R170E/E240N | | | | |
| Y155F/R318Y/R338E/ | Y[155]F/R150Y/R170E/ | 5.6 | 1.4 | 25% | 5 |
| E410N | E240N | | | | |
| K228N/R318Y/E410N | K63N/R150Y/E240N | 5.0 | 0.5 | 10% | 4 |
| R318Y/R403E/E410N | R150Y/R233E/E240N | 2.3 | 0.3 | 15% | 3 |
| R318Y/R338E/R403E/ | R150Y/R170E/R233E/ | 5.0 | 3.1 | 63% | 14 |
| E410N | E240N | | | | |
| A103N/N105S/R318Y/ | A[103]N/N[105]S/ | 5.4 | 0.9 | 16% | 5 |
| R338E/R403E/E410N | R150Y/R170E/R233E/ | | | | |
| | E240N | | | | |
| D104N/K106S/R318Y/ | D[104]N/K[106]S/ | 5.7 | 1.1 | 20% | 3 |
| R338E/R403E/E410N | R150Y/R170E/R233E/ | | | | |
| | E240N | | | | |
| Y155F/R318Y/R338E/ | Y[155]F/R150Y/R170E/ | 5.3 | 0.7 | 12% | 4 |
| R403E/E410N | R233E/E240N | | | | |
| A103N/N105S/Y155F/ | A[103]N/N[105]S/ | 6.4 | 0.5 | 7% | 2 |
| R318Y/R338E/R403E/ | Y[155]F/R150Y/R170E/ | | | | |
| E410N | R233E/E240N | | | | |
| D104N/K106S/Y155F/ | D[104]N/K[106]S/ | 8.5 | 0.8 | 10% | 2 |
| R318Y/R338E/R403E/ | Y[155]F/R150Y/R170E/ | | | | |
| E410N | R233E/E240N | | | | |
| D203N/F205T/R318Y/ | D39N/F41T/R150Y/ | 1.6 | 0.6 | 36% | 6 |
| E410N | E240N | | | | |
| R333S | R165S | 0.05 | 0.01 | 22% | 3 |
| R338L | R170L | 9.5 | 1.9 | 21% | 3 |
| K316N | K148N | 0.3 | 0.1 | 39% | 3 |
| K316A | K148A | 0.3 | 0.1 | 21% | 3 |
| K316E | K148E | 0.1 | 0.0 | 9% | 3 |
| K316S | K148S | 0.2 | 0.0 | 10% | 3 |
| K316M | K148M | 0.7 | 0.1 | 15% | 3 |
| E239S | E74S | 0.7 | 0.1 | 19% | 3 |
| E239A | E74A | 2.8 | 1.2 | 43% | 3 |
| E239R | E74R | 3.4 | 1.4 | 42% | 3 |
| E239K | E74K | 3.0 | 1.1 | 36% | 3 |
| H257F | H92F | 3.0 | 1.4 | 46% | 3 |
| H257Y | H92Y | 2.0 | 1.1 | 55% | 3 |
| H257E | H92E | 1.3 | 0.4 | 28% | 3 |
| H257S | H92S | 1.8 | 0.3 | 18% | 3 |
| T412A | T242A | 2.6 | 0.3 | 13% | 5 |
| T412V | T242V | 2.6 | 0.6 | 25% | 8 |
| E410N/T412A | E240N/T242A | 2.9 | 0.4 | 13% | 4 |
| E410N/T412V | E240N/T242V | 2.9 | 0.5 | 16% | 4 |
| E410Q | E240Q | 6.0 | 2.8 | 46% | 4 |
| E410S | E240S | 4.9 | 1.6 | 32% | 12 |
| E410A | E240A | 4.8 | 1.6 | 32% | 10 |
| E410D | E240D | 4.0 | 0.7 | 19% | 4 |
| N346D | N178D | 0.8 | 0.2 | 29% | 4 |
| Y155F/N346D | Y[155]F/N178D | 1.3 | 0.5 | 41% | 2 |
| N346Y | N178Y | 2.6 | 0.2 | 9% | 8 |
| Y345A | Y177A | 0.7 | 0.6 | 83% | 4 |
| Y345T | Y177T | 1.3 | 0.3 | 27% | 4 |
| T343R | T175R | 4.3 | 1.2 | 27% | 9 |
| T343E | T175E | 1.0 | 0.7 | 72% | 4 |
| T343Q | T175Q | 2.5 | 0.3 | 11% | 3 |
| F342I | F174I | 1.3 | 0.2 | 16% | 3 |
| T343R/Y345T | TI75R/YI77T | 2.4 | 0.3 | 14% | 3 |
| R318Y/R338E | R150Y/R170E | 3.4 | 0.5 | 14% | 4 |
| Y259F/K265T/Y345T | Y94F/K98T/Y177T | 1.7 | 0.1 | 5% | 2 |
| K228N/I251S | K63N/I86S | 2.7 | 1.1 | 41% | 2 |
| K228N/R318Y/R338E/ | K63N/R150Y/R170E/ | 5.1 | 0.7 | 14% | 3 |
| R403E/E410N | R233E/E240N | | | | |
| Y155F/K228N/R318Y/ | Y[155]F/K63N/R150Y/ | 9.7 | 1.6 | 16% | 2 |
| R338E/R403E/E410N | R170E/R233E/E240N | | | | |
| D85N/K228N/R318Y/ | D[85]N/K63N/R150Y/ | 6.0 | 0.6 | 10% | 2 |
| R338E/R403E/E410N | R170E/R233E/E240N | | | | |
| I251S/R318Y/R338E/ | I86S/R150Y/R170E/ | 4.8 | 0.6 | 12% | 4 |
| R403E/E410N | R233E/E240N | | | | |
| D104N/K106S/I251S/ | D[104]N/K[106]S/ | 5.5 | 0.9 | 17% | 8 |
| R318Y/R338E/R403E/ | I86S/R150Y/R170E/ | | | | |
| E410N | R233E/E240N | | | | |
| Y155F/I251S/R318Y/ | Y[155]F/I86S/ | 7.2 | 0.8 | 11% | 2 |
| R338E/R403E/E410N | R150Y/R170E/R233E/ | | | | |
| | E240N | | | | |
| I251S/R318Y/R338E/ | I86S/R150Y/R170E/ | 6.2 | 1.2 | 20% | 7 |
| E410N | E240N | | | | |
| D104N/K106S/I251S/ | D[104]N/K[106]S/ | 3.1 | 0.6 | 19% | 3 |
| R318Y/R338E/E410N | I86S/R150Y/R170E/ | | | | |
| | E240N | | | | |
| F314N/K316S | F145N/K148S | 0.0 | 0.0 | 7% | 2 |
| K247N/N249S/R318Y/ | K82N/N84S/R150Y/ | 5.8 | 1.1 | 19% | 6 |
| R338E/R403E/E410N | R170E/R233E/E240N | | | | |
| Y155F/K247N/N249S/ | Y[155]F/K82N/N84S/ | 6.5 | 1.1 | 17% | 6 |
| R318Y/R338E/R403E/ | R150Y/R170E/R233E/ | | | | |
| E410N | E240N | | | | |
| A103N/N105S/K247N/ | A[103]N/N[105]S/ | 4.1 | 0.8 | 18% | 2 |
| N249S/R318Y/R338E/ | K82N/N84S/R150Y/ | | | | |
| R403E/E410N | R170E/R233E/E240N | | | | |
| D104N/K106S/K247N/ | D[104]N/K[106]S/ | 5.2 | 0.3 | 6% | 2 |
| N249S/R318Y/R338E/ | K82N/N84S/R150Y/ | | | | |
| R403E/E410N | R170E/R233E/E240N | | | | |
| K247N/N249S/R318Y/ | K82N/N84S/R150Y/ | 3.8 | 1.6 | 41% | 6 |
| R338E/E410N | R170E/E240N | | | | |
| Y155F/K247N/N249S/ | Y[155]F/K82N/N84S/ | 4.3 | 1.4 | 33% | 7 |
| R318Y/R338E/E410N | R150Y/R170E/E240N | | | | |
| R318Y/R338E/R403E/ | R150Y/R170E/R233E/ | 5.8 | 0.6 | 10% | 4 |
| E410S | E240S | | | | |
| R318Y/R338E/E410S | R150Y/R170E/E240S | 5.1 | 1.7 | 33% | 8 |
| K228N/K247N/N249S | K63N/K82N/N84S | 3.5 | 0.1 | 4% | 2 |
| D104N/K106S/Y155F/ | D[104]N/K[106]S/ | 4.7 | 1.4 | 30% | 2 |
| K228N/K247N/N249S | Y[155]F/K63N/K82N/ | | | | |
| | N84S | | | | |
| D104N/K106S/K228N/ | D[104]N/K[106]S/ | 1.7 | 0.9 | 54% | 5 |
| K247N/N249S | K63N/K82N/N84S | | | | |
| Y155F/K228N/K247N/ | Y[155]F/K63N/K82N/ | 4.3 | 1.9 | 44% | 2 |
| N249S | N84S | | | | |
| K228N/K247N/N249S/ | K63N/K82N/N84S/ | 6.1 | 0.7 | 12% | 3 |
| R318Y/R338E/R403E/ | R150Y/R170E/R233E/ | | | | |
| E410N | E240N | | | | |
| R318Y/R338E/R403E/ | R150Y/R170E/R233E/ | 7.9 | 2.1 | 26% | 4 |
| E410N/T412V | E240N/T242V | | | | |
| R318Y/R338E/R403E/ | R150Y/R170E/R233E/ | 8.4 | 1.5 | 18% | 4 |
| E410N/T412A | E240N/T242A | | | | |
| R318Y/R338E/R403E/ | R150Y/R170E/R233E/ | 5.1 | 1.1 | 21% | 4 |
| T412A | T242A | | | | |
| R318Y/R338E/T412A | R150Y/R170E/T242A | 7.0 | 2.8 | 39% | 6 |
| R318Y/R338E/E410N/ | R150Y/R170E/E240N/ | 6.3 | 2.3 | 37% | 4 |
| T412V | T242V | | | | |
| N260S/R318Y/R338E/ | N95S/R150Y/R170E/ | 3.8 | 1.1 | 29% | 2 |
| R403E/E410N | R233E/E240N | | | | |
| D104N/K106S/N260S/ | D[104]N/K[106]S/ | 5.4 | 0.5 | 9% | 2 |
| R318Y/R338E/R403E/ | N95S/R150Y/R170E/ | | | | |
| E410N | R233E/E240N | | | | |
| Y155F/N260S/R318Y/ | Y[155]F/N95S/R150Y/ | 5.8 | 1.7 | 30% | 2 |
| R338E/R403E/E410N | R170E/R233E/E240N | | | | |
| R318Y/R338E/N346D/ | R150Y/R170E/N178D/ | 2.5 | 1.3 | 54% | 2 |
| R403E/E410N | R233E/E240N | | | | |
| Y155F/R318Y/R338E/ | Y[155]F/R150Y/R170E/ | 6.4 | 2.8 | 44% | 2 |
| N346D/R403E/E410N | N178D/R233E/E240N | | | | |
| K247N/N249S/N260S | K82N/N84S/N95S | 3.3 | 0.3 | 9% | 2 |
| Y155F/K247N/N249S/ | Y[155]F/K82N/N84S/ | 1.8 | 0.3 | 16% | 2 |
| N260S | N95S | | | | |
| D104N/K106S/K247N/ | D[104]N/K[106]S/ | 0.6 | 0.0 | 7% | 2 |
| N249S/N260S | K82N/N84S/N95S | | | | |
| D104N/K106S/Y155F/ | D[104]N/K[106]S/ | 0.5 | 0.0 | 2% | 2 |
| K247N/N249S/N260S | Y[155]F/K82N/N84S/ | | | | |
| | N95S | | | | |
| K247N/N249S/N260S/ | K82N/N84S/N95S/ | 6.0 | 0.5 | 9% | 2 |
| R318Y/R338E/R403E/ | R150Y/R170E/R233E/ | | | | |
| E410N | E240N | | | | |
| Y155F/N260S/N346D | Y[155]F/N95S/N178D | 0.3 | 0.1 | 29% | 2 |
| R318Y/R338E/T343R/ | R150Y/R170E/T175R/ | 11.8 | 2.4 | 20% | 3 |
| R403E/E410N | R233E/E240N | | | | |
| R338E/T343R | R170E/T175R | 7.7 | 1.3 | 17% | 4 |

†produced in BHK-21 cells;
*80% glycosylated form of E410N

TABLE 26
Catalytic activity of FIXa variants (k_{cat})

| Mutation | Mutation | | | | |
|---|---|---|---|---|---|
| (Mature FIX | (Chymotrypsin | k_{cat} | ± S.D. | | |
| Numbering) | Numbering) | (s⁻¹) | (s⁻¹) | % CV | n |
| BeneFIX ® | BeneFIX ® | 2.9 | 1.1 | 39% | 140 |
| Coagulation FIX | Coagulation FIX | | | | |
| (T148A) | (T[148]A) | | | | |
| Plasma Purified | Plasma Purified | 3.7 | 1.3 | 36% | 200 |
| FIXa | FIXa | | | | |
| Catalyst | Catalyst | 3.1 | 1.4 | 46% | 33 |
| Biosciences WT | Biosciences WT | | | | |
| N157D | N[157]D | 3.3 | 0.5 | 16% | 2 |
| Y155F | Y[155]F | 3.7 | 0.4 | 11% | 2 |
| A103N/N105S/Y155F | A[103]N/N[105]S/ | 3.2 | 0.0 | 0% | 2 |
| | Y[155]F | | | | |
| D104N/K106S/Y155F | D[104]N/K[106]S/ | 2.9 | 0.1 | 4% | 2 |
| | Y[155]F | | | | |
| A103N/N105S | A[103]N/N[105]S | 3.1 | 1.0 | 31% | 9 |
| D104N/K106S | D[104]N/K[106]S | 3.1 | 1.1 | 34% | 9 |
| K106N/V108S | K[106]N/V[108]S | 2.5 | 0.5 | 21% | 7 |
| D85N | D[85]N | 4.1 | 0.8 | 20% | 17 |
| T148A | T[148]A | 2.5 | 1.0 | 39% | 44 |
| T148A† | T[148]A† | 1.6 | 0.2 | 14% | 7 |
| K5A | K[5]A | 3.5 | 0.8 | 23% | 4 |
| D64N | D[64]N | 1.2 | 0.4 | 31% | 2 |
| D64A | D[64]A | 0.3 | 0.2 | 70% | 2 |
| N167D | N[167]D | 2.9 | 0.8 | 27% | 2 |
| N167Q | N[167]Q | 2.3 | 0.7 | 32% | 4 |
| S61A | S[61]A | 3.6 | 1.5 | 41% | 4 |
| S53A | S[531A | 3.7 | 1.7 | 44% | 3 |
| T159A | T[159]A | 3.7 | 1.2 | 34% | 3 |
| T169A | T[169]A | 4.6 | 1.6 | 36% | 3 |
| T172A | T[172]A | 4.4 | 1.5 | 34% | 3 |
| T179A | T[179]A | 5.1 | 0.6 | 12% | 3 |
| Y155H | Y[155]H | 4.6 | 0.9 | 18% | 3 |
| Y155Q | Y[155]Q | 4.4 | 1.0 | 24% | 3 |
| S158A | S[158]A | 3.9 | 0.1 | 3% | 2 |
| S158D | S[158]D | 3.5 | 0.3 | 8% | 2 |
| S158E | S[158]E | 3.5 | 0.2 | 5% | 2 |
| N157Q | N[157]Q | 3.5 | 0.1 | 4% | 2 |
| D203N/F205T | D39N/F41T | 1.6 | 0.6 | 40% | 12 |
| D85N/D203N/F205T | D[85]N/D39N/F41T | 1.2 | 0.5 | 40% | 5 |
| K228N | K63N | 2.7 | 1.2 | 43% | 13 |
| D85N/K228N | D[85]N/K63N | 2.7 | 0.8 | 29% | 6 |
| A103N/N105S/K228N | A[103]N/N[105]S/ | 2.1 | 0.5 | 22% | 3 |
| | K63N | | | | |
| D104N/K106S/K228N | D[104]N/K[106]S/ | 2.4 | 0.1 | 6% | 3 |
| | K63N | | | | |
| Y155F/K228N | Y[155]F/K63N | 3.3 | 0.3 | 10% | 2 |
| D104N/K106S/Y155F/ | D[104]N/K[106]S/ | 4.6 | 1.2 | 27% | 2 |
| K228N | Y[155]F/K63N | | | | |
| I251S | I86S | 3.8 | 1.1 | 30% | 13 |
| D85N/I251S | D[85]N/I86S | 2.8 | 0.6 | 22% | 5 |
| D85N/D104N/K106S/ | D[85]N/D[104]N/ | 1.5 | 0.3 | 19% | 5 |
| I251S | K[106]S/I86S | | | | |
| A103N/N105S/I251S | A[103]N/N[105]S/ | 2.9 | 1.0 | 36% | 3 |
| | I86S | | | | |
| D104N/K106S/I251S | D[104]N/K[106]S/ | 2.9 | 0.5 | 18% | 2 |
| | I86S | | | | |
| Y155F/I251S | Y[155]F/I86S | 3.7 | 0.8 | 22% | 2 |
| A262S | A95bS | 2.3 | 0.7 | 32% | 8 |
| K413N | K243N | 2.5 | 0.5 | 19% | 7 |
| E410N | E240N | 4.9 | 2.0 | 41% | 27 |
| E410N* | E240N* | 2.3 | 0.5 | 22% | 10 |
| E239N | E74N | 1.4 | 0.5 | 36% | 9 |
| T241N/H243S | T76N/H78S | 2.0 | 0.0 | 0% | 2 |
| K247N/N249S | K82N/N84S | 3.9 | 1.0 | 26% | 11 |
| Y155F/K247N/N249S | Y[155]F/K82N/N84S | 3.3 | 0.7 | 21% | 4 |
| A103N/N105S/K247N/ | A[103]N/N[105]S/ | 3.4 | 0.5 | 15% | 6 |
| N249S | K82N/N84S | | | | |
| D104N/K106S/K247N/ | D[104]N/K[106]S/ | 3.3 | 1.1 | 32% | 2 |
| N249S | K82N/N84S | | | | |
| D104N/K106S/Y155F/ | D[104]N/K[106]S/ | 2.8 | 1.1 | 40% | 3 |
| K247N/N249S | Y[155]F/K82N/N84S | | | | |
| L321N | L153N | 1.9 | 0.1 | 4% | 2 |
| F314N/H315S | F145N/H147S | 0.0 | 0.0 | 7% | 2 |
| K392N/K394S | K222N/K224S | 0.0 | n.d. | n.d. | 0 |
| S319N/L321S | S151N/L153S | 1.4 | 0.9 | 61% | 3 |
| N260S | N95S | 1.3 | 0.5 | 42% | 13 |
| D104N/K106S/N260S | D[104]N/K[106]S/ | 1.2 | 0.7 | 58% | 2 |
| | N95S | | | | |
| Y155F/N260S | Y[155]F/N95S | 1.9 | 0.6 | 32% | 2 |
| D104N/K106S/Y155F/ | D[104]N/K[106]S/ | 0.4 | 0.1 | 28% | 2 |
| N260S | Y[155]F/N95S | | | | |
| Y284N | Y117N | 2.0 | 0.9 | 45% | 8 |
| G317N | G149N | 0.0 | n.d. | n.d. | 1 |
| R318N/A320S | R150N/A152S | 0.0 | 0.0 | 95% | 3 |
| R318A | R150A | 2.7 | 0.9 | 32% | 2 |
| R318E | R150E | 0.6 | 0.2 | 35% | 3 |
| R318Y | R150Y | 2.9 | 0.7 | 26% | 3 |
| R312Q | R143Q | 0.3 | 0.1 | 26% | 3 |
| R312A | R143A | 0.3 | 0.0 | 8% | 2 |
| R312Y | R143Y | 0.4 | 0.3 | 73% | 2 |
| R312L | R143L | 0.7 | 0.3 | 41% | 2 |
| V202M | V38M | 2.6 | 1.0 | 37% | 2 |
| V202Y | V38Y | 1.8 | 0.2 | 10% | 2 |
| D203M | D39M | 1.8 | 0.8 | 42% | 5 |
| D203Y | D39Y | 1.7 | 0.5 | 27% | 4 |
| A204M | A40M | 0.6 | 0.5 | 84% | 5 |
| A204Y | A40Y | 1.9 | 0.8 | 42% | 2 |
| K400A/R403A | K230A/R233A | 0.3 | 0.0 | 5% | 2 |
| K400E/R403E | K230E/R233E | 0.1 | 0.0 | 50% | 3 |
| R403A | R233A | 0.6 | 0.2 | 24% | 7 |
| R403E | R233E | 0.4 | 0.1 | 25% | 6 |
| K400A | K230A | 1.4 | 0.2 | 14% | 2 |
| K400E | K230E | 0.6 | 0.0 | 4% | 2 |
| K293E | K126E | 0.5 | 0.1 | 15% | 2 |
| K293A | K126A | 1.4 | 0.4 | 28% | 2 |
| R333A | R165A | 0.1 | 0.0 | 35% | 2 |
| R333E | R165E | 0.0 | n.d. | n.d. | 1 |
| R338A | R170A | 5.4 | 0.3 | 5% | 2 |
| R338E | R170E | 4.7 | 1.0 | 21% | 10 |
| R338A/R403A | R170A/R233A | 3.8 | 0.9 | 24% | 6 |
| R338E/R403E | R170E/R233E | 3.3 | 1.2 | 37% | 2 |
| K293A/R403A | K126A/R233A | 0.4 | 0.0 | 9% | 2 |
| K293E/R403E | K126E/R233E | 0.1 | 0.0 | 37% | 2 |
| K293A/R338A/R403A | K126A/R170A/R233A | 1.6 | 0.7 | 41% | 2 |
| K293E/R338E/R403E | K126E/R170E/R233E | 0.8 | 0.2 | 27% | 2 |
| R318A/R403A | R150A/R233A | 0.7 | 0.1 | 12% | 2 |
| R318E/R403E | R150E/R233E | 0.1 | 0.0 | 35% | 2 |
| R318Y/E410N | R150Y/E240N | 3.5 | 0.9 | 27% | 21 |
| R338E/E410N | R170E/E240N | 5.2 | 1.1 | 22% | 12 |
| R338E/R403E/E410N | R170E/R233E/E240N | 5.8 | 3.0 | 52% | 17 |
| Y155F/R338E/R403E/ | Y[155]F/R170E/R233E/ | 5.9 | 0.4 | 7% | 2 |
| E410N | E240N | | | | |
| R318Y/R338E/R403E | R150Y/R170E/R233E | 3.6 | 0.4 | 10% | 3 |
| Y155F/R318Y/R338E/ | Y[155]F/R150Y/R170E/ | 5.1 | 1.0 | 19% | 2 |
| R403E | R233E | | | | |
| D203N/F205T/K228N | D39N/F41T/K63N | 0.6 | 0.2 | 27% | 2 |
| D203N/F205T/E410N | D39N/F41T/E240N | 1.7 | 0.3 | 16% | 6 |
| D203N/F205T/R338E | D39N/F41T/R170E | 2.5 | 0.0 | 2% | 2 |
| D203N/F205T/R338A | D39N/F41T/R170A | 2.3 | 0.5 | 23% | 3 |
| D203N/F205T/R318Y | D39N/F41T/R150Y | 0.9 | 0.1 | 13% | 4 |
| D203N/F205T/R338E/ | D39N/F41T/R170E/ | 0.9 | 0.0 | 5% | 2 |
| R403E | R233E | | | | |
| K228N/E410N | K63N/E240N | 3.5 | 0.9 | 27% | 10 |
| K228N/R338E | K63N/R170E | 4.8 | 0.8 | 17% | 2 |
| K228N/R338A | K63N/R170A | 6.5 | 0.5 | 7% | 2 |
| K228N/R318Y | K63N/R150Y | 2.9 | 0.6 | 19% | 5 |
| K228N/R338E/R403E | K63N/R170E/R233E | 2.8 | 0.3 | 9% | 2 |
| R403E/E410N | R233E/E240N | 2.0 | 0.2 | 9% | 2 |
| R318Y/R338E/E410N | R150Y/R170E/E240N | 4.4 | 1.2 | 27% | 42 |
| D104N/K106S/R318Y/ | D[104]N/K[106]S/ | 4.8 | 0.6 | 12% | 4 |
| R338E/E410N | R150Y/R170E/E240N | | | | |
| Y155F/R318Y/R338E/ | Y[155]F/R150Y/ | 5.6 | 1.4 | 25% | 5 |
| E410N | R170E/E240N | | | | |
| K228N/R318Y/E410N | K63N/R150Y/E240N | 5.0 | 0.5 | 10% | 4 |
| R318Y/R403E/E410N | R150Y/R233E/E240N | 2.3 | 0.3 | 11% | 5 |
| Υ155F/R318Y/R403E/ | Y[155]F/R150Y/R233E/ | 2.9 | 0.6 | 20% | 2 |
| E410N | E240N | | | | |
| R318Y/R338E/R403E/ | R150Y/R170E/R233E/ | 5.8 | 2.8 | 48% | 26 |
| E410N | E240N | | | | |
| A103N/N105S/R318Y/ | A[103]N/N[105]S/ | 5.4 | 0.9 | 16% | 5 |
| R338E/R403E/E410N | R150Y/R170E/R233E/ | | | | |
| | E240N | | | | |
| D104N/K106S/R318Y/ | D[104]N/K[106]S/ | 5.7 | 1.1 | 20% | 3 |
| R338E/R403E/E410N | R150Y/R170E/R233E/ | | | | |
| | E240N | | | | |
| Y155F/R318Y/R338E/ | Y[155]F/R150Y/R170E/ | 5.3 | 0.7 | 12% | 4 |
| R403E/E410N | R233E/E240N | | | | |
| A103N/N105S/Y155F/ | A[103]N/N[105]S/ | 6.4 | 0.5 | 7% | 2 |
| R318Y/R338E/R403E/ | Y[155]F/R150Y/R170E/ | | | | |
| E410N | R233E/E240N | | | | |
| D104N/K106S/Y155F/ | D[104]N/K[106]S/ | 8.5 | 0.8 | 10% | 2 |
| R318Y/R338E/R403E/ | Y[155]F/R150Y/R170E/ | | | | |
| E410N | R233E/E240N | | | | |
| D203N/F205T/R318Y/ | D39N/F41T/R150Y/ | 1.6 | 0.6 | 36% | 6 |
| E410N | E240N | | | | |
| R333S | R165S | 0.1 | 0.0 | 22% | 3 |
| R338L | R170L | 9.5 | 1.9 | 21% | 3 |
| K316N | K148N | 0.3 | 0.1 | 39% | 3 |
| K316A | K148A | 0.3 | 0.1 | 21% | 3 |
| K316E | K148E | 0.1 | 0.0 | 9% | 3 |
| K316S | K148S | 0.2 | 0.0 | 10% | 3 |
| K316M | K148M | 0.7 | 0.1 | 15% | 3 |
| E239S | E74S | 0.7 | 0.1 | 19% | 3 |
| E239A | E74A | 2.8 | 1.2 | 43% | 3 |
| E239R | E74R | 3.4 | 1.4 | 42% | 3 |
| E239K | E74K | 3.0 | 1.1 | 36% | 3 |
| H257F | H92F | 3.0 | 1.4 | 46% | 3 |
| H257Y | H92Y | 2.0 | 1.1 | 55% | 3 |
| H257E | H92E | 1.3 | 0.4 | 28% | 3 |
| H257S | H92S | 1.8 | 0.3 | 18% | 3 |
| T412A | T242A | 2.6 | 0.3 | 13% | 5 |
| T412V | T242V | 2.6 | 0.6 | 25% | 8 |
| E410N/T412A | E240N/T242A | 2.9 | 0.4 | 13% | 4 |
| E410N/T412V | E240N/T242V | 2.9 | 0.5 | 16% | 4 |
| E410Q | E240Q | 6.0 | 2.8 | 46% | 4 |
| E410S | E240S | 4.9 | 1.6 | 32% | 12 |
| E410A | E240A | 4.8 | 1.6 | 32% | 10 |
| E410D | E240D | 4.0 | 0.7 | 19% | 4 |
| N346D | N178D | 0.8 | 0.2 | 29% | 4 |
| Y155F/N346D | Y[155]F/N178D | 1.3 | 0.5 | 41% | 2 |
| N346Y | N178Y | 2.6 | 0.2 | 9% | 8 |
| Y345A | Y177A | 0.7 | 0.6 | 83% | 4 |
| Y345T | Y177T | 1.3 | 0.3 | 27% | 4 |
| T343R | T175R | 4.1 | 1.1 | 27% | 12 |
| T343E | T175E | 1.0 | 0.7 | 72% | 4 |
| T343Q | T175Q | 2.5 | 0.3 | 11% | 3 |
| F342I | F174I | 1.3 | 0.2 | 16% | 3 |
| T343R/Y345T | T175R/Y177T | 2.4 | 0.3 | 14% | 3 |
| R318Y/R338E | R150Y/R170E | 3.4 | 0.5 | 14% | 4 |
| Y259F/K265T/Y345T | Y94F/K98T/Y177T | 1.7 | 0.1 | 5% | 2 |
| K228N/I251S | K63N/I86S | 2.7 | 1.1 | 41% | 2 |
| K228N/R318Y/R338E/ | K63N/R150Y/R170E/ | 5.1 | 0.7 | 14% | 3 |
| R403E/E410N | R233E/E240N | | | | |
| Y155F/K228N/R318Y/ | Y[155]F/K63N/R150Y/ | 6.7 | 3.0 | 45% | 5 |
| R338E/R403E/E410N | R170E/R233E/E240N | | | | |
| D85N/K228N/R318Y/ | D[85]N/K63N/R150Y/ | 6.0 | 0.6 | 10% | 2 |
| R338E/R403E/E410N | R170E/R233E/E240N | | | | |
| I251S/R318Y/R338E/ | I86S/R150Y/R170E/ | 4.8 | 0.6 | 12% | 4 |
| R403E/E410N | R233E/E240N | | | | |
| D104N/K106S/I251S/ | D[104]N/K[106]S/ | 5.5 | 0.9 | 17% | 8 |
| R318Y/R338E/R403E/ | I86S/R150Y/R170E/ | | | | |
| E410N | R233E/E240N | | | | |
| Y155F/I251S/R318Y/ | D[104]N/K[106]S/ | 7.2 | 0.8 | 11% | 2 |
| R338E/R403E/E410N | I86S/R150Y/R170E/ | | | | |
| | R233E/E240N | | | | |
| I251S/R318Y/R338E/ | I86S/R150Y/R170E/ | 6.4 | 2.0 | 31% | 10 |
| E410N | E240N | | | | |
| D104N/K106S/I251S/ | D[104]N/K[106]S/ | 3.1 | 0.6 | 19% | 3 |
| R318Y/R338E/E410N | I86S/R150Y/R170E/ | | | | |
| | E240N | | | | |
| F314N/K316S | F145N/K148S | 0.0 | 0.0 | 7% | 2 |
| K247N/N249S/R318Y/ | K82N/N84S/R150Y/ | 5.8 | 1.1 | 19% | 6 |
| R338E/R403E/E410N | R170E/R233E/E240N | | | | |
| Y155F/K247N/N249S/ | Y[155]F/K82N/N84S/ | 6.2 | 1.0 | 16% | 10 |
| R318Y/R338E/R403E/ | R150Y/R170E/R233E/ | | | | |
| E410N | E240N | | | | |
| A103N/N105S/K247N/ | A[103]N/N[105]S/ | 3.9 | 0.4 | 11% | 6 |
| N249S/R318Y/R338E/ | K82N/N84S/R150Y/ | | | | |
| R403E/E410N | R170E/R233E/E240N | | | | |
| D104N/K106S/K247N/ | D[104]N/K[106]S/ | 5.2 | 0.3 | 6% | 2 |
| N249S/R318Y/R338E/ | K82N/N84S/R150Y/ | | | | |
| R403E/E410N | R170E/R233E/E240N | | | | |
| D104N/K106S/Y155F/ | D[104]N/K[106]S/ | 6.9 | 4.7 | 67% | 6 |
| K247N/N249S/R318Y/ | Y[155]F/K82N/N84S/ | | | | |
| R338E/R403E/E410N | R150Y/R170E/R233E/ | | | | |
| | E240N | | | | |
| K247N/N249S/R318Y/ | K82N/N84S/R150Y/ | 3.8 | 1.6 | 41% | 6 |
| R338E/E410N | R170E/E240N | | | | |
| Y155F/K247N/N249S/ | Y[155]F/K82N/N84S/ | 4.5 | 1.3 | 28% | 9 |
| R318Y/R338E/E410N | R150Y/R170E/E240N | | | | |
| R318Y/R338E/R403E/ | R150Y/R170E/R233E/ | 7.4 | 2.3 | 31% | 7 |
| E410S | E240S | | | | |
| R318Y/R338E/E410S | R150Y/R170E/E240S | 5.1 | 1.7 | 33% | 8 |
| K228N/K247N/N249S | K63N/K82N/N84S | 3.5 | 0.1 | 4% | 2 |
| D104N/K106S/Y155F/ | D[104]N/K[106]S/ | 4.7 | 1.4 | 30% | 2 |
| K228N/K247N/N249S | Y[155]F/K63N/K82N/ | | | | |
| | N84S | | | | |
| D104N/K106S/K228N/ | D[104]N/K[106]S/ | 1.7 | 0.9 | 54% | 5 |
| K247N/N249S | K63N/K82N/N84S | | | | |
| Y155F/K228N/K247N/ | Y[155]F/K63N/K82N/ | 4.3 | 1.9 | 44% | 2 |
| N249S | N84S | | | | |
| K228N/K247N/N249S/ | K63N/K82N/N84S/ | 7.1 | 2.2 | 31% | 17 |
| R318Y/R338E/R403E/ | R150Y/R170E/R233E/ | | | | |
| E410N | E240N | | | | |
| D104N/K106S/K228N/ | D[104]N/K[106]S/ | 6.1 | 3.7 | 61% | 7 |
| K247N/N249S/R318Y/ | K63N/K82N/N84S/ | | | | |
| R338E/R403E/E410N | R150Y/R170E/R233E/ | | | | |
| | E240N | | | | |
| Y155F/K228N/K247N/ | Y[155]F/K63N/K82N/ | 5.1 | 1.8 | 34% | 5 |
| N249S/R318Y/R338E/ | N84S/R150Y/R170E/ | | | | |
| R403E/E410N | R233E/E240N | | | | |
| R318Y/R338E/R403E/ | R150Y/R170E/R233E/ | 7.0 | 2.1 | 30% | 6 |
| E410N/T412V | E240N/T242V | | | | |
| R318Y/R338E/R403E/ | R150Y/R170E/R233E/ | 7.8 | 1.6 | 20% | 6 |
| E410N/T412A | E240N/T242A | | | | |
| R318Y/R338E/R403E/ | R150Y/R170E/R233E/ | 5.1 | 1.1 | 21% | 4 |
| T412A | T242A | | | | |
| R318Y/R338E/T412A | R150Y/R170E/T242A | 7.0 | 2.8 | 39% | 6 |
| R318Y/R338E/E410N/ | R150Y/R170E/E240N/ | 5.2 | 1.7 | 33% | 11 |
| T412V | T242V | | | | |
| N260S/R318Y/R338E/ | N95S/R150Y/R170E/ | 3.8 | 1.1 | 29% | 2 |
| R403E/E410N | R233E/E240N | | | | |
| D104N/K106S/N260S/ | D[104]N/K[106]S/ | 5.4 | 0.5 | 9% | 2 |
| R318Y/R338E/R403E/ | N95S/R150Y/R170E/ | | | | |
| E410N | R233E/E240N | | | | |
| Y155F/N260S/R318Y/ | Y[155]F/N95S/R150Y/ | 5.8 | 1.7 | 30% | 2 |
| R338E/R403E/E410N | R170E/R233E/E240N | | | | |
| R318Y/R338E/N346D/ | R150Y/R170E/N178D/ | 2.5 | 1.3 | 54% | 2 |
| R403E/E410N | R233E/E240N | | | | |
| Y155F/R318Y/R338E/ | Y[155]F/R150Y/R170E/ | 6.4 | 2.8 | 44% | 2 |
| N346D/R403E/E410N | N178D/R233E/E240N | | | | |
| K247N/N249S/N260S | K82N/N84S/N95S | 3.3 | 0.3 | 9% | 2 |
| Y155F/K247N/N249S/ | Y[155]F/K82N/N84S/ | 1.8 | 0.3 | 16% | 2 |
| N260S | N95S | | | | |
| D104N/K106S/K247N/ | D[104]N/K[106]S/ | 0.6 | 0.0 | 7% | 2 |
| N249S/N260S | K82N/N84S/N95S | | | | |
| D104N/K106S/Y155F/ | D[104]N/K[106]S/ | 0.5 | 0.0 | 2% | 2 |
| K247N/N249S/N260S | Y[155]F/K82N/N84S/ | | | | |
| | N95S | | | | |
| K247N/N249S/N260S/ | K82N/N84S/N95S/ | 3.4 | 2.1 | 62% | 6 |
| R318Y/R338E/R403E/ | R150Y/R170E/R233E/ | | | | |
| E410N | E240N | | | | |
| Y155F/K247N/N249S/ | Y[155]F/K82N/N84S/ | 3.6 | 1.2 | 33% | 5 |
| N260S/R318Y/R338E/ | N95S/R150Y/R170E/ | | | | |
| R403E/E410N | R233E/E240N | | | | |
| Y155F/N260S/N346D | Y[155]F/N95S/N178D | 0.3 | 0.1 | 29% | 2 |
| R318Y/R338E/T343R/ | R150Y/R170E/T175R/ | 9.7 | 2.6 | 27% | 13 |
| R403E/E410N | R233E/E240N | | | | |
| Y155F/R318Y/R338E/ | Y[155]F/R150Y/R170E/ | 7.8 | 1.9 | 24% | 4 |
| T343R/R403E/E410N | T175R/R233E/E240N | | | | |
| D104N/K106S/R318Y/ | D[104]N/K[106]S/ | 5.7 | 2.3 | 41% | 5 |
| R338E/T343R/R403E/ | R150Y/R170E/T175R/ | | | | |
| E410N | R233E/E240N | | | | |
| R338E/T343R | R170E/T175R | 7.1 | 1.4 | 20% | 7 |
| T343R/N346Y | T175R/N178Y | 2.3 | 0.5 | 21% | 11 |
| R318Y/R338E/N346Y/ | R150Y/R170E/N178Y/ | 3.4 | 0.3 | 9% | 3 |
| R403E/E410N | R233E/E240N | | | | |
| R318Y/R338E/T343R/ | R150Y/R170E/T175R/ | 4.6 | 1.2 | 26% | 5 |
| N346Y/R403E/E410N | N178Y/R233E/E240N | | | | |
| T343R/N346D | T175R/N178D | 1.9 | 0.4 | 21% | 2 |
| R318Y/R338E/T343R/ | R150Y/R170E/T175R/ | 5.4 | 2.0 | 36% | 2 |
| N346D/R403E/E410N | N178D/R233E/E240N | | | | |
| R318Y/R338E/Y345A/ | R150Y/R170E/Y177A/ | 1.4 | 0.5 | 36% | 6 |
| R403E/E410N | R233E/E240N | | | | |
| R318Y/R338E/Y345A/ | R150Y/R170E/Y177A/ | 1.2 | 0.3 | 26% | 3 |
| N346D/R403E/E410N | N178D/R233E/E240N | | | | |
| Y155F/K247N/N249S/ | Y[155]F/K82N/N84S/ | 5.7 | 3.2 | 55% | 5 |
| R318Y/R338E/R403E | R150Y/R170E/R233E | | | | |
| K247N/N249S/R318Y/ | K82N/N84S/R150Y/ | 10.5 | 3.6 | 34% | 2 |
| R338E/R403E | R170E/R233E | | | | |
| Y155F/K247N/N249S/ | Y[155]F/K82N/N84S/ | 1.2 | 0.5 | 40% | 3 |
| R318Y/R403E/E410N | R150Y/R233E/E240N | | | | |
| K247N/N249S/R318Y/ | K82N/N84S/R150Y/ | 2.9 | 1.6 | 55% | 10 |
| R403E/E410N | R233E/E240N | | | | |
| Y155F/K247N/N249S/ | Y[155]F/K82N/N84S/ | 5.0 | 0.6 | 13% | 3 |
| R338E/R403E/E410N | R170E/R233E/E240N | | | | |
| K247N/N249S/R338E/ | K82N/N84S/R170E/ | 4.8 | 0.8 | 17% | 2 |
| R403E/E410N | R233E/E240N | | | | |
| R318Y/R338E/T343R/ | R150Y/R170E/T175R/ | 6.7 | 1.6 | 24% | 4 |
| R403E | R233E | | | | |
| Y155F/R318Y/R338E/ | Y[155]F/R150Y/R170E/ | 8.2 | 4.1 | 50% | 4 |
| T343R/R403E | T175R/R233E | | | | |
| R318Y/R338E/T343R/ | R150Y/R170E/T175R/ | 4.9 | 1.2 | 24% | 16 |
| E410N | E240N | | | | |
| Y155F/R318Y/R338E/ | Y[155]F/R150Y/R170E/ | 9.2 | 3.1 | 33% | 4 |
| T343R/E410N | T175R/E240N | | | | |
| R318Y/T343R/R403E/ | R150Y/T175R/R233E/ | 5.3 | 0.9 | 17% | 3 |
| E410N | E240N | | | | |
| Y155F/R318Y/T343R/ | Y[155]F/R150Y/T175R/ | 8.8 | 0.3 | 4% | 2 |
| R403E/E410N | R233E/E240N | | | | |
| R338E/T343R/R403E/ | R170E/T175R/R233E/ | 9.8 | 1.4 | 15% | 2 |
| E410N | E240N | | | | |
| Y155F/R338E/T343R/ | Y[155]F/R170E/T175R/ | 5.7 | 1.1 | 20% | 4 |
| R403E/E410N | R233E/E240N | | | | |
| Y155F/K247N/N249S/ | Y[155]F/K82N/N84S/ | 9.7 | 3.4 | 35% | 11 |
| R318Y/R338E/T343R/ | R150Y/R170E/T175R/ | | | | |
| R403E/E410N | R233E/E240N | | | | |
| K247N/N249S/R318Y/ | K82N/N84S/R150Y/ | 10.6 | 3.6 | 34% | 5 |
| R338E/T343R/R403E/ | R170E/T175R/R233E/ | | | | |
| E410N | E240N | | | | |
| K228N/I251S/R318Y/ | K63N/I86S/R150Y/ | 7.5 | 3.3 | 44% | 7 |
| R338E/R403E/E410N | R170E/R233E/E240N | | | | |
| Y155F/K228N/I251S/ | Y[155]F/K63N/I86S/ | 5.3 | 1.9 | 36% | 5 |
| R318Y/R338E/R403E/ | R150Y/R170E/R233E/ | | | | |
| E410N | E240N | | | | |
| N260S/R318Y/R338E/ | N95S/R150Y/R170E/ | 8.9 | 3.6 | 40% | 7 |
| T343R/R403E/E410N | T175R/R233E/E240N | | | | |
| Y155F/N260S/R318Y/ | Y[155]F/N95S/R150Y/ | 5.8 | 1.6 | 28% | 5 |
| R338E/T343R/R403E/ | R170E/T175R/R233E/ | | | | |
| E410N | E240N | | | | |
| K228N/K247N/N249S/ | K63N/K82N/N84S/ | 9.9 | 3.2 | 32% | 12 |
| R318Y/R338E/T343R/ | R150Y/R170E/T175R/ | | | | |
| R403E/E410N | R233E/E240N | | | | |
| Y155F/K228N/K247N/ | Y[155]F/K63N/K82N/ | 9.4 | 2.3 | 25% | 5 |
| N249S/R318Y/R338E/ | N84S/R150Y/R170E/ | | | | |
| T343R/R403E/E410N | T175R/R233E/E240N | | | | |
| Y155F/R338E/T343R/ | Y[155]F/R170E/T175R/ | 5.2 | 0.9 | 18% | 5 |
| R403E | R233E | | | | |
| R338E/T343R/R403E | R170E/T175R/R233E | 6.9 | 0.3 | 4% | 2 |
| Y155F/R338E/T343R/ | Y[155]F/R170E/T175R/ | 6.8 | 2.4 | 34% | 6 |
| R403E/E410S | R233E/E240S | | | | |
| Y155F/N260S/R338E/ | Y[155]F/N95S/R170E/ | 6.4 | 3.8 | 59% | 6 |
| T343R/R403E | T175R/R233E | | | | |
| Y155F/I251S/R338E/ | Y[155]F/I86S/R170E/ | 5.9 | 0.7 | 12% | 2 |
| T343R/R403E | T175R/R233E | | | | |
| R318Y/R338E/T343R/ | R150Y/R170E/T175R/ | 7.6 | 1.7 | 22% | 14 |
| R403E/E410S | R233E/E240S | | | | |
| Y155F/K247N/N249S/ | Y[155]F/K82N/N84S/ | 4.7 | 0.2 | 5% | 4 |
| T343R/R403E | T175R/R233E | | | | |
| Y155F/K247N/N249S/ | Y[155]F/K82N/N84S/ | 10.6 | 0.8 | 8% | 2 |
| R318Y/R338E/T343R/ | R150Y/R170E/T175R/ | | | | |
| R403E | R233E | | | | |
| K247N/N249S/R318Y/ | K82N/N84S/R150Y/ | 9.2 | 3.3 | 36% | 4 |
| R338E/T343R/R403E | R170E/ | | | | |
| | T175R/R233E | | | | |
| Y155F/K247N/N249S/ | Y[155]F/K82N/N84S/ | 9.8 | 0.7 | 8% | 2 |
| R338E/T343R/R403E/ | R170E/T175R/R233E/ | | | | |
| E410N | E240N | | | | |
| K247N/N249S/R338E/ | K82N/N84S/R170E/ | 10.8 | 1.6 | 15% | 2 |
| T343R/R403E/E410N | T175R/R233E/E240N | | | | |
| Y155F/K247N/N249S/ | Y[155]F/K82N/N84S/ | 7.5 | 1.5 | 20% | 2 |
| R318Y/R338E | R150Y/R170E | | | | |
| Y155F/K247N/N249S/ | Y[155]F/K82N/N84S/ | 10.3 | 3.3 | 32% | 4 |
| R318Y/T343R | R150Y/T175R | | | | |
| Y155F/K247N/N249S/ | Y[155]F/K82N/N84S/ | 1.7 | 0.7 | 42% | 3 |
| R318Y/R403E | R150Y/R233E | | | | |
| Y155F/K247N/N249S/ | Y[155]F/K82N/N84S/ | 3.4 | 0.9 | 26% | 3 |
| R318Y/E410N | R150Y/E240N | | | | |
| Y155F/K247N/N249S/ | Y[155]F/K82N/N84S/ | 5.3 | 0.6 | 11% | 2 |
| R338E/R403E | R170E/R233E | | | | |
| Y155F/K247N/N249S/ | Y[155]F/K82N/N84S/ | 10.6 | 1.1 | 10% | 2 |
| R338E/T343R | R170E/T175R | | | | |
| Y155F/K247N/N249S/ | Y[155]F/K82N/N84S/ | 7.7 | 2.3 | 30% | 4 |
| R318Y/R338E/T343R/ | R150Y/R170E/T175R/ | | | | |
| E410N | E240N | | | | |
| K247N/N249S/R318Y/ | K82N/N84S/R150Y/ | 8.8 | 4.4 | 50% | 6 |
| R338E/T343R/E410N | R170E/T175R/E240N | | | | |
| Y155F/K247N/N249S/ | Y[155]F/K82N/N84S/ | 9.0 | 0.4 | 5% | 2 |
| R318Y/T343R/R403E/ | R150Y/T175R/R233E/ | | | | |
| E410N | E240N | | | | |
| K247N/N249S/R318Y/ | K82N/N84S/R150Y/ | 9.5 | 1.6 | 17% | 7 |
| T343R/R403E/E410N | T175R/R233E/E240N | | | | |
| Y155F/K247N/N249S/ | Y[155]F/K82N/N84S/ | 7.3 | 3.5 | 48% | 8 |
| R338E/E410N | R170E/E240N | | | | |
| Y155F/K247N/N249S/ | Y[155]F/K82N/N84S/ | 7.5 | 2.1 | 28% | 2 |
| R318Y/T343R/R403E | R150Y/T175R/R233E | | | | |
| K247N/N249S/R318Y/ | K82N/N84S/R150Y/ | 3.7 | 1.6 | 44% | 9 |
| T343R/R403E | T175R/R233E | | | | |
| Y155F/K247N/N249S/ | Y[155]F/K82N/N84S/ | 8.1 | 4.1 | 51% | 4 |
| R318Y/T343R/E410N | R150Y/T175R/E240N | | | | |
| K247N/N249S/R318Y/ | K82N/N84S/R150Y/ | 6.1 | 2.6 | 42% | 4 |
| T343R/E410N | T175R/E240N | | | | |
| Y155F/K247N/N249S/ | Y[155]F/K82N/N84S/ | 14.6 | 0.2 | 1% | 2 |
| R338E/T343R/R403E | R170E/T175R/R233E | | | | |
| K247N/N249S/R338E/ | K82N/N84S/R170E/ | 14.6 | 0.4 | 3% | 2 |
| T343R/R403E | T175R/R233E | | | | |
| Y155F/K247N/N249S/ | Y[155]F/K82N/N84S/ | 4.8 | 1.0 | 20% | 2 |
| R338E/T343R/E410N | R170E/T175R/E240N | | | | |
| K247N/N249S/R338E/ | K82N/N84S/R170E/ | 7.9 | 1.4 | 18% | 5 |
| T343R/E410N | T175R/E240N | | | | |
| Y155F/K247N/N249S/ | Y[155]F/K82N/N84S/ | 15.0 | 3.0 | 20% | 2 |
| T343R/R403E/E410N | T175R/R233E/E240N | | | | |
| K247N/N249S/T343R/ | K82N/N84S/T175R/ | 8.0 | 2.8 | 36% | 2 |
| R403E/E410N | R233E/E240N | | | | |
| Y155F/R318Y/R338E/ | Y[155]F/R150Y/R170E/ | 7.9 | 3.0 | 38% | 7 |
| T343R | T175R | | | | |
| R318Y/R338E/T343R | R150Y/R170E/T175R | 4.5 | 1.2 | 27% | 2 |
| Y155F/R318Y/T343R/ | Y[155]F/R150Y/T175R/ | 5.0 | 1.1 | 22% | 2 |
| R403E | R233E | | | | |
| Y155F/T343R/R403E/ | Y[155]F/T175R/R233E/ | 6.6 | 1.4 | 21% | 2 |
| E410N | E240N | | | | |
| Y155F/K247N/N249S/ | Y[155]F/K82N/N84S/ | 8.5 | 3.3 | 39% | 7 |
| R318Y/R338E/T343R | R150Y/R170E/T175R | | | | |
| K247N/N249S/R318Y/ | K82N/N84S/R150Y/ | 8.0 | 1.7 | 22% | 4 |
| R338E/T343R | R170E/T175R | | | | |
| Y155F/K247N/N249S/ | Y[155]F/K82N/N84S/ | 7.9 | 1.6 | 20% | 5 |
| T343R/E410N | T175R/E240N | | | | |
| Y155F/K247N/N249S/ | Y[155]F/K82N/N84S/ | 2.7 | 1.4 | 52% | 7 |
| R403E/E410N | R233E/E240N | | | | |
| Y155F/R338E/T343R/ | Y[155]F/R170E/T175R/ | 6.0 | 2.2 | 37% | 6 |
| E410N | E240N | | | | |
| R338E/T343R/E410N | R170E/T175R/E240N | 3.1 | 0.5 | 16% | 2 |
| Y155F/R318Y/T343R/ | Y[155]F/R150Y/T175R/ | 5.0 | 1.3 | 25% | 4 |
| E410N | E240N | | | | |
| R318Y/T343R/E410N | R150Y/T175R/E240N | 3.2 | 0.4 | 13% | 2 |
| K228N/R318Y/R338E/ | K63N/R150Y/R170E/ | 10.5 | 0.7 | 6% | 3 |
| T343R/R403E/E410N | T175R/R233E/E240N | | | | |
| K228N/K247N/N249S/ | K63N/K82N/N84S/ | 10.9 | 1.4 | 13% | 3 |
| R318Y/R338E/T343R/ | R150Y/R170E/T175R/ | | | | |
| R403E | R233E | | | | |
| K228N/247N/N249S/ | K63N/K82N/N84S/ | 4.7 | 0.4 | 8% | 2 |
| R318Y/R338E/T343R/ | R150Y/R170E/T175R/ | | | | |
| E410N | E240N | | | | |
| K228N/K247N/N249S/ | K63N/K82N/N84S/ | 8.1 | 2.1 | 26% | 3 |
| R318Y/T343R/R403E/ | R150Y/T175R/R233E/ | | | | |
| E410N | E240N | | | | |

†produced in BHK-21 cells;
*80% glycosylated form of E410N

TABLE 27
Catalytic activity of FIXa variants (K_{M})

| Mutation | Mutation | | | | |
|---|---|---|---|---|---|
| (Mature FIX | (Chymotrypsin | K_{M} | ±S.D. | | |
| Numbering) | Numbering) | (nM) | (nM) | % CV | n |
| BeneFIX ® | BeneFIX ® | 76.9 | 27.5 | 36% | 125 |
| Coagulation FIX | Coagulation FIX | | | | |
| (T148A) | (T[148]A) | | | | |
| Plasma Purified | Plasma Purified | 74.5 | 25.5 | 34% | 120 |
| FIXa | FIXa | | | | |
| Catalyst | Catalyst | 74.7 | 23.1 | 31% | 31 |
| Biosciences WT | Biosciences WT | | | | |
| N157D | N[157]D | 121.8 | 53.0 | 44% | 2 |
| Y155F | Y[155]F | 90.3 | 10.3 | 11% | 2 |
| A103N/N105S/Y155F | A[103]N/N[105]S/ | 80.4 | 2.5 | 3% | 2 |
| | Y[155]F | | | | |
| D104N/K106S/Y155F | D[104]N/K[106]S/ | 81.5 | 5.2 | 6% | 2 |
| | Y[155]F | | | | |
| A103N/N105S | A[103]N/N[105]S | 88.0 | 22.5 | 26% | 9 |
| D104N/K106S | D[104]N/K[106]S | 83.2 | 18.2 | 22% | 9 |
| K106N/V108S | K[106]N/V[108]S | 91.9 | 20.2 | 22% | 7 |
| D85N | D[85]N | 64.5 | 23.1 | 36% | 15 |
| T148A | T[148]A | 64.5 | 25.1 | 39% | 30 |
| T148A† | T[148]A† | 74.6 | 16.1 | 22% | 7 |
| K5A | K[5]A | 55.0 | 0.3 | 1% | 2 |
| D64N | D[64]N | 121.4 | 58.8 | 48% | 2 |
| D64A | D[64]A | 129.4 | 36.3 | 28% | 2 |
| N167D | N[167]D | 94.6 | 7.0 | 7% | 2 |
| N167Q | N[167]Q | 77.1 | 35.8 | 46% | 4 |
| S61A | S[61]A | 84.6 | 35.6 | 42% | 4 |
| S53A | S[53]A | 109.9 | 11.6 | 11% | 3 |
| T159A | T[159]A | 100.9 | 1.2 | 1% | 3 |
| T169A | T[169]A | 99.7 | 10.8 | 11% | 3 |
| T172A | T[172]A | 96.2 | 22.1 | 23% | 3 |
| T179A | T[179]A | 94.5 | 16.7 | 18% | 3 |
| Y155H | Y[155]H | 93.9 | 15.8 | 17% | 3 |
| Y155Q | Y[155]Q | 87.6 | 29.8 | 34% | 3 |
| S158A | S[158]A | 107.7 | 0.4 | 0% | 2 |
| S158D | S[158]D | 87.0 | 9.0 | 10% | 2 |
| S158E | S[158]E | 96.0 | 14.1 | 15% | 2 |
| N157Q | N[157]Q | 107.8 | 5.5 | 5% | 2 |
| D203N/F205T | D39N/F41T | 74.3 | 19.5 | 26% | 12 |
| D85N/D203N/F205T | D[85]N/D39N/F41T | 40.6 | 9.1 | 22% | 5 |
| K228N | K63N | 72.5 | 25.5 | 35% | 13 |
| D85N/K228N | D[85]N/K63N | 60.1 | 13.4 | 22% | 6 |
| A103N/N105S/K228N | A[103]N/N[105]S/ | 76.5 | 15.8 | 21% | 3 |
| | K63N | | | | |
| D104N/K106S/K228N | D[104]N/K[106]S/ | 96.8 | 21.2 | 22% | 3 |
| | K63N | | | | |
| Y155F/K228N | Y[155]F/K63N | 73.7 | 3.7 | 5% | 2 |
| D104N/K106S/Y155F/ | D[104]N/K[106]S/ | 76.2 | 6.4 | 8% | 2 |
| K228N | Y[155]F/K63N | | | | |
| I251S | I86S | 64.3 | 13.3 | 21% | 13 |
| D85N/I251S | D[85]N/I86S | 51.5 | 15.3 | 30% | 5 |
| D85N/D104N/K106S/ | D[85]N/D[104]N/ | 46.4 | 19.0 | 41% | 5 |
| I251S | K[106]S/I86S | | | | |
| A103N/N105S/I251S | A[103]N/N[105]S/ | 90.9 | 41.2 | 45% | 3 |
| | I86S | | | | |
| D104N/K106S/I251S | D[104]N/K[106]S/ | 97.5 | 13.8 | 14% | 2 |
| | I86S | | | | |
| Y155F/I251S | Y[155]F/I86S | 56.4 | 17.5 | 31% | 2 |
| A262S | A95bS | 99.2 | 19.9 | 20% | 8 |
| K413N | K243N | 109.6 | 41.0 | 37% | 5 |
| E410N | E240N | 46.2 | 21.5 | 47% | 21 |
| E410N* | E240N* | 83.3 | 36.9 | 44% | 11 |
| E239N | E74N | 78.3 | 29.5 | 38% | 9 |
| T241N/H243S | T76N/H78S | 104.5 | 3.5 | 3% | 2 |
| K247N/N249S | K82N/N84S | 75.0 | 15.4 | 21% | 11 |
| Y155F/K247N/N249S | Y[155]F/K82N/N84S | 67.1 | 23.6 | 35% | 4 |
| A103N/N105S/K247N/ | A[103]N/N[105]S/ | 84.0 | 9.7 | 12% | 6 |
| N249S | K82N/N84S | | | | |
| D104N/K106S/K247N/ | D[104]N/K[106]S/ | 102.3 | 23.0 | 23% | 2 |
| N249S | K82N/N84S | | | | |
| D104N/K106S/Y155F/ | D[104]N/K[106]S/ | 89.3 | 10.3 | 12% | 3 |
| K247N/N249S | Y[155]F/K82N/N84S | | | | |
| L321N | L153N | 118.5 | 10.6 | 9% | 2 |
| F314N/H315S | F145N/H147S | No | n.d. | n.d. | 4 |
| | | Activity | | | |
| S319N/L321S | S151N/L153S | 54.2 | 14.8 | 27% | 3 |
| N260S | N95S | 83.4 | 27.5 | 33% | 13 |
| D104N/K106S/N260S | D[104]N/K[106]S/ | 94.3 | 6.8 | 7% | 2 |
| | N95S | | | | |
| Y155F/N260S | Y[155]F/N95S | 130.6 | 78.1 | 60% | 2 |
| D104N/K106S/Y155F/ | D[104]N/K[106]S/ | 107.7 | 74.8 | 69% | 2 |
| N260S | Y[155]F/N95S | | | | |
| Y284N | Y117N | 59.8 | 23.5 | 39% | 8 |
| G317N | G149N | No | n.d. | n.d. | 5 |
| | | Activity | | | |
| R318N/A320S | R150N/A152S | No | n.d. | n.d. | 8 |
| | | Activity | | | |
| R318A | R150A | 52.8 | 25.8 | 49% | 3 |
| R318E | R150E | 33.6 | 10.3 | 31% | 3 |
| R318Y | R150Y | 40.7 | 7.6 | 19% | 3 |
| R312Q | R143Q | 29.9 | 5.0 | 17% | 3 |
| R312A | R143A | 61.6 | 16.9 | 27% | 2 |
| R312Y | R143Y | 27.2 | 11.4 | 42% | 2 |
| R312L | R143L | 28.8 | 0.6 | 2% | 2 |
| V202M | V38M | 40.2 | 1.0 | 2% | 2 |
| V202Y | V38Y | 70.6 | 2.3 | 3% | 2 |
| D203M | D39M | 40.6 | 7.9 | 19% | 5 |
| D203Y | D39Y | 58.0 | 19.5 | 34% | 4 |
| A204M | A40M | 34.0 | 9.2 | 27% | 5 |
| A204Y | A40Y | 39.5 | 10.3 | 26% | 2 |
| K400A/R403A | K230A/R233A | 56.7 | 10.0 | 18% | 2 |
| K400E/R403E | K230E/R233E | No | n.d. | n.d. | 4 |
| | | Activity | | | |
| R403A | R233A | 46.4 | 5.2 | 11% | 7 |
| R403E | R233E | 67.0 | 19.4 | 29% | 6 |
| K400A | K230A | 74.6 | 22.1 | 30% | 2 |
| K400E | K230E | 61.3 | 9.3 | 15% | 2 |
| K293E | K126E | 63.2 | 13.9 | 22% | 2 |
| K293A | K126A | 73.7 | 35.2 | 48% | 2 |
| R333A | R165A | No | n.d. | n.d. | 2 |
| | | Activity | | | |
| R333E | R165E | No | n.d. | n.d. | 2 |
| | | Activity | | | |
| R338A | R170A | 33.7 | 3.7 | 11% | 2 |
| R338E | R170E | 28.7 | 9.0 | 31% | 10 |
| R338A/R403A | R170A/R233A | 73.6 | 18.1 | 25% | 6 |
| R338E/R403E | R170E/R233E | 51.9 | 11.9 | 23% | 2 |
| K293A/R403A | K126A/R233A | 69.2 | 10.2 | 15% | 2 |
| K293E/R403E | K126E/R233E | 104.1 | 31.0 | 30% | 2 |
| K293A/R338A/R403A | K126A/R170A/R233A | 65.4 | 1.3 | 2% | 2 |
| K293E/R338E/R403E | K126E/R170E/R233E | 50.0 | 15.1 | 30% | 2 |
| R318A/R403A | R150A/R233A | 45.7 | 1.6 | 3% | 2 |
| R318E/R403E | R150E/R233E | 75.3 | 47.7 | 63% | 2 |
| R318Y/E410N | R150Y/E240N | 49.6 | 14.3 | 29% | 21 |
| R338E/E410N | R170E/E240N | 12.6 | 4.2 | 33% | 8 |
| R338E/R403E/E410N | R170E/R233E/E240N | 45.5 | 12.8 | 28% | 7 |
| R318Y/R338E/R403E | R150Y/R170E/R233E | 53.7 | 1.9 | 4% | 2 |
| D203N/F205T/K228N | D39N/F41T/K63N | 39.9 | 3.8 | 9% | 2 |
| D203N/F205T/E410N | D39N/F41T/E240N | 45.5 | 12.0 | 26% | 6 |
| D203N/F205T/R338E | D39N/F41T/R170E | 24.1 | 5.6 | 23% | 2 |
| D203N/F205T/R338A | D39N/F41T/R170A | 38.5 | 9.9 | 26% | 3 |
| D203N/F205T/R318Y | D39N/F41T/R150Y | 47.5 | 6.4 | 13% | 4 |
| D203N/F205T/R338E/ | D39N/F41T/R170E/ | 51.1 | 10.7 | 21% | 2 |
| R403E | R233E | | | | |
| K228N/E410N | K63N/E240N | 44.3 | 13.0 | 29% | 10 |
| K228N/R338E | K63N/R170E | 23.1 | 3.0 | 13% | 2 |
| K228N/R338A | K63N/R170A | 31.2 | 4.5 | 14% | 2 |
| K228N/R318Y | K63N/R150Y | 61.3 | 5.4 | 9% | 5 |
| K228N/R338E/R403E | K63N/R170E/R233E | 59.2 | 4.9 | 8% | 2 |
| R403E/E410N | R233E/E240N | 93.7 | 1.0 | 1% | 2 |
| R318Y/R338E/E410N | R150Y/R170E/E240N | 14.2 | 4.3 | 30% | 26 |
| D104N/K106S/R318Y/ | D[104]N/K[106]S/ | 18.9 | 4.1 | 22% | 4 |
| R338E/E410N | R150Y/R170E/E240N | | | | |
| Y155F/R318Y/R338E/ | Y[155]F/R150Y/R170E/ | 16.0 | 4.8 | 30% | 5 |
| E410N | E240N | | | | |
| K228N/R318Y/E410N | K63N/R150Y/E240N | 42.0 | 4.7 | 11% | 4 |
| R318Y/R403E/E410N | R150Y/R233E/E240N | 88.3 | 12.4 | 14% | 3 |
| R318Y/R338E/R403E/ | R150Y/R170E/R233E/ | 45.5 | 12.2 | 27% | 14 |
| E410N | E240N | | | | |
| A103N/N105S/R318Y/ | A[103]N/N[105]S/ | 44.7 | 20.9 | 47% | 5 |
| R338E/R403E/E410N | R150Y/R170E/R233E/ | | | | |
| | E240N | | | | |
| D104N/K106S/R318Y/ | D[104]N/K[106]S/ | 38.5 | 16.1 | 42% | 3 |
| R338E/R403E/E410N | R150Y/R170E/R233E/ | | | | |
| | E240N | | | | |
| Y155F/R318Y/R338E/ | Y[155]F/R150Y/R170E/ | 30.4 | 10.5 | 35% | 4 |
| R403E/E410N | R233E/E240N | | | | |
| A103N/N105S/Y155F/ | A[103]N/N[105]S/ | 50.7 | 4.5 | 9% | 2 |
| R318Y/R338E/R403E/ | Y[155]F/R150Y/R170E/ | | | | |
| E410N | R233E/E240N | | | | |
| D104N/K106S/Y155F/ | D[104]N/K[106]S/ | 48.0 | 2.1 | 4% | 2 |
| R318Y/R338E/R403E/ | Y[155]F/R150Y/R170E/ | | | | |
| E410N | R233E/E240N | | | | |
| D203N/F205T/R318Y/ | D39N/F41T/R150Y/ | 45.7 | 13.4 | 29% | 6 |
| E410N | E240N | | | | |
| R333S | R165S | 605.9 | 317.5 | 52% | 3 |
| R338L | R170L | 47.9 | 9.0 | 19% | 3 |
| K316N | K148N | 62.5 | 15.6 | 25% | 3 |
| K316A | K148A | 55.2 | 4.1 | 7% | 3 |
| K316E | K148E | 110.5 | 25.1 | 23% | 3 |
| K316S | K148S | 57.3 | 4.6 | 8% | 3 |
| K316M | K148M | 26.0 | 16.7 | 64% | 3 |
| E239S | E74S | 28.5 | 19.2 | 67% | 3 |
| E239A | E74A | 55.4 | 18.4 | 33% | 3 |
| E239R | E74R | 58.3 | 13.9 | 24% | 3 |
| E239K | E74K | 59.2 | 25.5 | 43% | 3 |
| H257F | H92F | 62.0 | 30.1 | 49% | 3 |
| H257Y | H92Y | 59.3 | 25.0 | 42% | 3 |
| H257E | H92E | 59.7 | 39.6 | 66% | 3 |
| H257S | H92S | 56.0 | 24.7 | 44% | 3 |
| T412A | T242A | 76.1 | 44.7 | 59% | 5 |
| T412V | T242V | 51.2 | 18.9 | 37% | 8 |
| E410N/T412A | E240N/T242A | 37.2 | 3.6 | 10% | 4 |
| E410N/T412V | E240N/T242V | 33.3 | 4.9 | 15% | 4 |
| E410Q | E240Q | 56.1 | 18.0 | 32% | 4 |
| E410S | E240S | 50.0 | 11.9 | 24% | 12 |
| E410A | E240A | 47.7 | 11.7 | 24% | 10 |
| E410D | E240D | 71.9 | 26.9 | 37% | 4 |
| N346D | N178D | 45.7 | 7.8 | 17% | 4 |
| Y155F/N346D | Y[155]F/N178D | 104.4 | 14.5 | 14% | 2 |
| N346Y | N178Y | 27.4 | 4.2 | 15% | 8 |
| Y345A | Y177A | 50.8 | 32.4 | 64% | 4 |
| Y345T | Y177T | 28.6 | 7.9 | 28% | 4 |
| T343R | T175R | 31.3 | 10.9 | 35% | 9 |
| T343E | T175E | 27.3 | 10.0 | 37% | 4 |
| T343Q | T175Q | 37.0 | 9.1 | 25% | 3 |
| F342I | F174I | 30.0 | 19.1 | 64% | 3 |
| T343R/Y345T | T175R/Y177T | 26.5 | 6.8 | 26% | 3 |
| R318Y/R338E | R150Y/R170E | 24.6 | 5.5 | 22% | 4 |
| Y259F/K265T/Y345T | Y94F/K98T/Y177T | 30.9 | 4.8 | 16% | 2 |
| K228N/I251S | K63N/I86S | 122.6 | 53.5 | 44% | 2 |
| K228N/R318Y/R338E/ | K63N/R150Y/R170E/ | 36.1 | 14.0 | 39% | 3 |
| R403E/E410N | R233E/E240N | | | | |
| Y155F/K228N/R318Y/ | Y[155]F/K63N/R150Y/ | 48.0 | 9.8 | 21% | 2 |
| R338E/R403E/E410N | R170E/R233E/E240N | | | | |
| D85N/K228N/R318Y/ | D[85]N/K63N/R150Y/ | 39.3 | 9.8 | 25% | 2 |
| R338E/R403E/E410N | R170E/R233E/E240N | | | | |
| I251S/R318Y/R338E/ | I86S/R150Y/R170E/ | 33.4 | 10.2 | 30% | 4 |
| R403E/E410N | R233E/E240N | | | | |
| D104N/K106S/I251S/ | D[104]N/K[106]S/ | 46.2 | 7.7 | 17% | 8 |
| R318Y/R338E/R403E/ | I86S/R150Y/R170E/ | | | | |
| E410N | R233E/E240N | | | | |
| Y155F/I251S/R318Y/ | Y[155]F/I86S/R150Y/ | 43.3 | 7.0 | 16% | 2 |
| R338E/R403E/E410N | R170E/R233E/E240N | | | | |
| I251S/R318Y/R338E/ | I86S/R150Y/R170E/ | 16.2 | 1.8 | 11% | 7 |
| E410N | E240N | | | | |
| D104N/K106S/I251S/ | D[104]N/K[106]S/ | 24.3 | 8.6 | 35% | 3 |
| R318Y/R338E/E410N | I86S/R150Y/R170E/ | | | | |
| | E240N | | | | |
| F314N/K316S | F145N/K148S | 635.1 | 569.9 | 90% | 2 |
| K247N/N249S/R318Y/ | K82N/N84S/R150Y/ | 39.2 | 8.3 | 21% | 6 |
| R338E/R403E/E410N | R170E/R233E/E240N | | | | |
| Y155F/K247N/N249S/ | Y[155]F/K82N/N84S/ | 39.1 | 14.7 | 38% | 6 |
| R318Y/R338E/R403E/ | R150Y/R170E/R233E/ | | | | |
| E410N | E240N | | | | |
| A103N/N105S/K247N/ | A[103]N/N[105]S/ | 39.7 | 4.5 | 11% | 2 |
| N249S/R318Y/R338E/ | K82N/N84S/R150Y/ | | | | |
| R403E/E410N | R170E/R233E/E240N | | | | |
| D104N/K106S/K247N/ | D[104]N/K[106]S/ | 59.0 | 0.6 | 1% | 2 |
| N249S/R318Y/R338E/ | K82N/N84S/R150Y/ | | | | |
| R403E/E410N | R170E/R233E/E240N | | | | |
| K247N/N249S/R318Y/ | K82N/N84S/R150Y/ | 16.6 | 3.7 | 22% | 6 |
| R338E/E410N | R170E/E240N | | | | |
| Y155F/K247N/N249S/ | Y[155]F/K82N/N84S/ | 15.3 | 4.1 | 27% | 7 |
| R318Y/R338E/E410N | R150Y/R170E/E240N | | | | |
| R318Y/R338E/R403E/ | R150Y/R170E/R233E/ | 35.1 | 12.4 | 35% | 4 |
| E410S | E240S | | | | |
| R318Y/R338E/E410S | R150Y/R170E/E240S | 16.4 | 4.0 | 25% | 8 |
| K228N/K247N/N249S | K63N/K82N/N84S | 94.5 | 27.0 | 29% | 2 |
| D104N/K106S/Y155F/ | D[104]N/K[106]S/ | 75.3 | 26.4 | 35% | 2 |
| K228N/K247N/N249S | Y[155]F/K63N/K82N/ | | | | |
| | N84S | | | | |
| D104N/K106S/K228N/ | D[104]N/K[106]S/ | 77.1 | 18.3 | 24% | 5 |
| K247N/N249S | K63N/K82N/N84S | | | | |
| Y155F/K228N/K247N/ | Y[155]F/K63N/K82N/ | 79.2 | 27.6 | 35% | 2 |
| N249S | N84S | | | | |
| K228N/K247N/N249S/ | K63N/K82N/N84S/ | 55.8 | 15.8 | 28% | 3 |
| R318Y/R338E/R403E/ | R150Y/R170E/R233E/ | | | | |
| E410N | E240N | | | | |
| R318Y/R338E/R403E/ | R150Y/R170E/R233E/ | 44.3 | 19.2 | 43% | 4 |
| E410N/T412V | E240N/T242V | | | | |
| R318Y/R338E/R403E/ | R150Y/R170E/R233E/ | 33.5 | 4.8 | 14% | 4 |
| E410N/T412A | E240N/T242A | | | | |
| R318Y/R338E/R403E/ | R150Y/R170E/R233E/ | 67.5 | 11.6 | 17% | 4 |
| T412A | T242A | | | | |
| R318Y/R338E/T412A | R150Y/R170E/T242A | 23.5 | 5.3 | 22% | 6 |
| R318Y/R338E/E410N/ | R150Y/R170E/E240N/ | 29.7 | 10.9 | 37% | 4 |
| T412V | T242V | | | | |
| N260S/R318Y/R338E/ | N95S/R150Y/R170E/ | 72.4 | 20.2 | 28% | 2 |
| R403E/E410N | R233E/E240N | | | | |
| D104N/K106S/N260S/ | D[104]N/K[106]S/ | 61.1 | 0.0 | 0% | 2 |
| R318Y/R338E/R403E/ | N95S/R150Y/R170E/ | | | | |
| E410N | R233E/E240N | | | | |
| Y155F/N260S/R318Y/ | Y[155]F/N95S/R150Y/ | 83.9 | 4.4 | 5% | 2 |
| R338E/R403E/E410N | R170E/R233E/E240N | | | | |
| R318Y/R338E/N346D/ | R150Y/R170E/N178D/ | 77.7 | 20.9 | 27% | 2 |
| R403E/E410N | R233E/E240N | | | | |
| Y155F/R318Y/R338E/ | Y[155]F/R150Y/R170E/ | 100.0 | 15.6 | 16% | 2 |
| N346D/R403E/E410N | N178D/R233E/E240N | | | | |
| K247N/N249S/N260S | K82N/N84S/N95S | 114.1 | 0.0 | 0% | 2 |
| Y155F/K247N/N249S/ | Y[155]F/K82N/N84S/ | 96.5 | 5.5 | 6% | 2 |
| N260S | N95S | | | | |
| D104N/K106S/K247N/ | D[104]N/K[106]S/ | 61.2 | 14.1 | 23% | 2 |
| N249S/N260S | K82N/N84S/N95S | | | | |
| D104N/K106S/Y155F/ | D[104]N/K[106]S/ | 68.5 | 33.2 | 49% | 2 |
| K247N/N249S/N260S | Y[155]F/K82N/N84S/ | | | | |
| | N95S | | | | |
| K247N/N249S/N260S/ | K82N/N84S/N95S/ | 62.2 | 0.0 | 0% | 2 |
| R318Y/R338E/R403E/ | R150Y/R170E/R233E/ | | | | |
| E410N | E240N | | | | |
| Y155F/N260S/N346D | Y[155]F/N95S/N178D | 127.9 | 6.2 | 5% | 2 |
| R318Y/R338E/T343R/ | R150Y/R170E/T175R/ | 22.3 | 5.0 | 23% | 3 |
| R403E/E410N | R233E/E240N | | | | |
| R338E/T343R | R170E/T175R | 13.6 | 3.7 | 27% | 4 |

†produced in BHK-21 cells;
*80% glycosylated form of E410N

TABLE 28
Catalytic activity of FIXa variants (K_{M})

| Mutation | Mutation | | | | |
|---|---|---|---|---|---|
| (Mature FIX | (Chymotrypsin | K_{M} | ±S.D. | | |
| Numbering) | Numbering) | (nM) | (nM) | % CV | n |
| BeneFIX ® Coagulation | BeneFIX ® Coagulation | 75.8 | 27.2 | 36% | 140 |
| FIX (T148A) | FIX (T[148]A) | | | | |
| Plasma Purified FIXa | Plasma Purified FIXa | 73.3 | 26.8 | 37% | 200 |
| Catalyst Biosciences WT | Catalyst Biosciences WT | 72.3 | 24.3 | 34% | 33 |
| N157D | N[157]D | 121.8 | 53.0 | 44% | 2 |
| Y155F | Y[155]F | 90.3 | 10.3 | 11% | 2 |
| A103N/N105S/Y155F | A[103]N/N[105]S/Y[155]F | 80.4 | 2.5 | 3% | 2 |
| D104N/K106S/Y155F | D[104]N/K[106]S/Y[155]F | 81.5 | 5.2 | 6% | 2 |
| A103N/N105S | A[103]N/N[105]S | 88.0 | 22.5 | 26% | 9 |
| D104N/K106S | D[104]N/K[106]S | 83.2 | 18.2 | 22% | 9 |
| K106N/V108S | K[106]N/V[108]S | 91.9 | 20.2 | 22% | 7 |
| D85N | D[85]N | 64.5 | 21.9 | 34% | 17 |
| T148A | T[148]A | 70.1 | 26.9 | 38% | 44 |
| T148A† | T[148]A† | 74.6 | 16.1 | 22% | 7 |
| K5A | K[5]A | 65.4 | 26.8 | 41% | 4 |
| D64N | D[64]N | 121.4 | 58.8 | 48% | 2 |
| D64A | D[64]A | 129.4 | 36.3 | 28% | 2 |
| N167D | N[167]D | 94.6 | 7.0 | 7% | 2 |
| N167Q | N[167]Q | 77.1 | 35.8 | 46% | 4 |
| S61A | S[61]A | 84.6 | 35.6 | 42% | 4 |
| S53A | S[53]A | 109.9 | 11.6 | 11% | 3 |
| T159A | T[159]A | 100.9 | 1.2 | 1% | 3 |
| T169A | T[169]A | 99.7 | 10.8 | 11% | 3 |
| T172A | T[172]A | 96.2 | 22.1 | 23% | 3 |
| T179A | T[179]A | 94.5 | 16.7 | 18% | 3 |
| Y155H | Y[155]H | 93.9 | 15.8 | 17% | 3 |
| Y155Q | Y[155]Q | 87.6 | 29.8 | 34% | 3 |
| S158A | S[158]A | 107.7 | 0.4 | 0% | 2 |
| S158D | S[158]D | 87.0 | 9.0 | 10% | 2 |
| S158E | S[158]E | 96.0 | 14.1 | 15% | 2 |
| N157Q | N[157]Q | 107.8 | 5.5 | 5% | 2 |
| D203N/F205T | D39N/F41T | 74.3 | 19.5 | 26% | 12 |
| D85N/D203N/F205T | D[85]N/D39N/F41T | 40.6 | 9.1 | 22% | 5 |
| K228N | K63N | 72.5 | 25.5 | 35% | 13 |
| D85N/K228N | D[85]N/K63N | 60.1 | 13.4 | 22% | 6 |
| A103N/N105S/K228N | A[103]N/N[105]S/K63N | 76.5 | 15.8 | 21% | 3 |
| D104N/K106S/K228N | D[104]N/K[106]S/K63N | 96.8 | 21.2 | 22% | 3 |
| Y155F/K228N | Y[155]F/K63N | 73.7 | 3.7 | 5% | 2 |
| D104N/K106S/Y155F/K228N | D[104]N/K[106]S/Y[155] | 76.2 | 6.4 | 8% | 2 |
| | F/K63N | | | | |
| I251S | I86S | 64.3 | 13.3 | 21% | 13 |
| D85N/I251S | D[85]N/I86S | 51.5 | 15.3 | 30% | 5 |
| D85N/D104N/K106S/I251S | D[85]N/D[104]N/K[106] | 46.4 | 19.0 | 41% | 5 |
| | S/I86S | | | | |
| A103N/N105S/I251S | A[103]N/N[105]S/I86S | 90.9 | 41.2 | 45% | 3 |
| D104N/K106S/I251S | D[104]N/K[106]S/I86S | 97.5 | 13.8 | 14% | 2 |
| Y155F/I251S | Y[155]F/I86S | 56.4 | 17.5 | 31% | 2 |
| A262S | A95bS | 99.2 | 19.9 | 20% | 8 |
| K413N | K243N | 106.3 | 40.4 | 38% | 7 |
| E410N | E240N | 45.9 | 19.1 | 42% | 27 |
| E410N* | E240N* | 85.2 | 38.1 | 45% | 10 |
| E239N | E74N | 78.3 | 29.5 | 38% | 9 |
| T241N/H243S | T76N/H78S | 104.5 | 3.5 | 3% | 2 |
| K247N/N249S | K82N/N84S | 75.0 | 15.4 | 21% | 11 |
| Y155F/K247N/N249S | Y[155]F/K82N/N84S | 67.1 | 23.6 | 35% | 4 |
| A103N/N105S/K247N/N249S | A[103]N/N[105]S/K82N/N84S | 84.0 | 9.7 | 12% | 6 |
| D104N/K106S/K247N/N249S | D[104]N/K[106]S/K82N/N84S | 102.3 | 23.0 | 23% | 2 |
| D104N/K106S/Y155F/K247N/ | D[104]N/K[106]S/Y[155] | 89.3 | 10.3 | 12% | 3 |
| N249S | F/K82N/N84S | | | | |
| L321N | L153N | 118.5 | 10.6 | 9% | 2 |
| F314N/H315S | F145N/H147S | 93.0 | 14.3 | 15% | 2 |
| K392N/K394S | K222N/K224S | 0.0 | n.d. | n.d. | 0 |
| S319N/L321S | S151N/L153S | 54.2 | 14.8 | 27% | 3 |
| N260S | N95S | 83.4 | 27.5 | 33% | 13 |
| D104N/K106S/N260S | D[104]N/K[106]S/N95S | 94.3 | 6.8 | 7% | 2 |
| Y155F/N260S | Y[155]F/N95S | 130.6 | 78.1 | 60% | 2 |
| D104N/K106S/Y155F/N260S | D[104]N/K[106]S/Y[155] | 107.7 | 74.8 | 69% | 2 |
| | F/N95S | | | | |
| Y284N | Y117N | 59.8 | 23.5 | 39% | 8 |
| G317N | G149N | 104.6 | n.d. | n.d. | 1 |
| R318N/A320S | R150N/A152S | 84.5 | 21.2 | 25% | 3 |
| R318A | R150A | 62.3 | 28.2 | 45% | 2 |
| R318E | R150E | 33.6 | 10.3 | 31% | 3 |
| R318Y | R150Y | 40.7 | 7.6 | 19% | 3 |
| R312Q | R143Q | 29.9 | 5.0 | 17% | 3 |
| R312A | R143A | 61.6 | 16.9 | 27% | 2 |
| R312Y | R143Y | 27.2 | 11.4 | 42% | 2 |
| R312L | R143L | 28.8 | 0.6 | 2% | 2 |
| V202M | V38M | 40.2 | 1.0 | 2% | 2 |
| V202Y | V38Y | 70.6 | 2.3 | 3% | 2 |
| D203M | D39M | 40.6 | 7.9 | 19% | 5 |
| D203Y | D39Y | 58.0 | 19.5 | 34% | 4 |
| A204M | A40M | 34.0 | 9.2 | 27% | 5 |
| A204Y | A40Y | 39.5 | 10.3 | 26% | 2 |
| K400A/R403A | K230A/R233A | 56.7 | 10.0 | 18% | 2 |
| K400E/R403E | K230E/R233E | 137.1 | 68.4 | 50% | 3 |
| R403A | R233A | 46.4 | 5.2 | 11% | 7 |
| R403E | R233E | 67.0 | 19.4 | 29% | 6 |
| K400A | K230A | 74.6 | 22.1 | 30% | 2 |
| K400E | K230E | 61.3 | 9.3 | 15% | 2 |
| K293E | K126E | 63.2 | 13.9 | 22% | 2 |
| K293A | K126A | 73.7 | 35.2 | 48% | 2 |
| R333A | R165A | 406.7 | 117.5 | 29% | 2 |
| R333E | R165E | 437.3 | n.d. | n.d. | 1 |
| R338A | R170A | 33.7 | 3.7 | 11% | 2 |
| R338E | R170E | 28.7 | 9.0 | 31% | 10 |
| R338A/R403A | R170A/R233A | 73.6 | 18.1 | 25% | 6 |
| R338E/R403E | R170E/R233E | 51.9 | 11.9 | 23% | 2 |
| K293A/R403A | K126A/R233A | 69.2 | 10.2 | 15% | 2 |
| K293E/R403E | K126E/R233E | 104.1 | 31.0 | 30% | 2 |
| K293A/R338A/R403A | K126A/R170A/R233A | 65.4 | 1.3 | 2% | 2 |
| K293E/R338E/R403E | K126E/R170E/R233E | 50.0 | 15.1 | 30% | 2 |
| R318A/R403A | R150A/R233A | 45.7 | 1.6 | 3% | 2 |
| R318E/R403E | R150E/R233E | 75.3 | 47.7 | 63% | 2 |
| R318Y/E410N | R150Y/E240N | 49.6 | 14.3 | 29% | 21 |
| R338E/E410N | R170E/E240N | 12.6 | 3.5 | 28% | 12 |
| R338E/R403E/E410N | R170E/R233E/E240N | 36.7 | 12.2 | 33% | 17 |
| Y155F/R338E/R403E/E410N | Y[155]F/R170E/R233E/E240N | 33.6 | 8.6 | 26% | 2 |
| R318Y/R338E/R403E | R150Y/R170E/R233E | 59.7 | 10.4 | 17% | 3 |
| Y155F/R318Y/R338E/R403E | Y[155]F/R150Y/R170E/R233E | 67.1 | 27.9 | 42% | 2 |
| D203N/F205T/K228N | D39N/F41T/K63N | 39.9 | 3.8 | 9% | 2 |
| D203N/F205T/E410N | D39N/F41T/E240N | 45.5 | 12.0 | 26% | 6 |
| D203N/F205T/R338E | D39N/F41T/R170E | 24.1 | 5.6 | 23% | 2 |
| D203N/F205T/R338A | D39N/F41T/R170A | 38.5 | 9.9 | 26% | 3 |
| D203N/F205T/R318Y | D39N/F41T/R150Y | 47.5 | 6.4 | 13% | 4 |
| D203N/F205T/R338E/R403E | D39N/F41T/R170E/R233E | 51.1 | 10.7 | 21% | 2 |
| K228N/E410N | K63N/E240N | 44.3 | 13.0 | 29% | 10 |
| K228N/R338E | K63N/R170E | 23.1 | 3.0 | 13% | 2 |
| K228N/R338A | K63N/R170A | 31.2 | 4.5 | 14% | 2 |
| K228N/R318Y | K63N/R150Y | 61.3 | 5.4 | 9% | 5 |
| K228N/R338E/R403E | K63N/R170E/R233E | 59.2 | 4.9 | 8% | 2 |
| R403E/E410N | R233E/E240N | 93.7 | 1.0 | 1% | 2 |
| R318Y/R338E/E410N | R150Y/R170E/E240N | 13.9 | 4.0 | 29% | 42 |
| D104N/K106S/R318Y/R338E/ | D[104]N/K[106]S/R150Y/ | 18.9 | 4.1 | 22% | 4 |
| E410N | R170E/E240N | | | | |
| Y155F/R318Y/R338E/E410N | Y[155]F/R150Y/R170E/E240N | 16.0 | 4.8 | 30% | 5 |
| K228N/R318Y/E410N | K63N/R150Y/E240N | 42.0 | 4.7 | 11% | 4 |
| R318Y/R403E/E410N | R150Y/R233E/E240N | 94.2 | 21.1 | 22% | 5 |
| Y155F/R318Y/R403E/E410N | Y[155]F/R150Y/R233E/E240N | 111.4 | 74.7 | 67% | 2 |
| R318Y/R338E/R403E/E410N | R150Y/R170E/R233E/E240N | 43.2 | 13.8 | 32% | 26 |
| A103N/N105S/R318Y/R338E/ | A[103]N/N[105]S/R150Y/ | 44.7 | 20.9 | 47% | 5 |
| R403E/E410N | R170E/R233E/E240N | | | | |
| D104N/K106S/R318Y/R338E/ | D[104]N/K[106]S/R150Y/ | 38.5 | 16.1 | 42% | 3 |
| R403E/E410N | R170E/R233E/E240N | | | | |
| Y155F/R318Y/R338E/R403E/ | Y[155]F/R150Y/R170E/R233E/ | 30.4 | 10.5 | 35% | 4 |
| E410N | E240N | | | | |
| A103N/N105S/Y155F/R318Y/ | A[103]N/N[105]S/Y[155] | 50.7 | 4.5 | 9% | 2 |
| R338E/R403E/E410N | F/R150Y/R170E/R233E/E240N | | | | |
| D104N/K106S/Y155F/R318Y/ | D[104]N/K[106]S/Y[155] | 48.0 | 2.1 | 4% | 2 |
| R338E/R403E/E410N | F/R150Y/R170E/R233E/E240N | | | | |
| D203N/F205T/R318Y/E410N | D39N/F41T/R150Y/E240N | 45.7 | 13.4 | 29% | 6 |
| R333S | R165S | 605.9 | 317.5 | 52% | 3 |
| R338L | R170L | 47.9 | 9.0 | 19% | 3 |
| K316N | K148N | 62.5 | 15.6 | 25% | 3 |
| K316A | K148A | 55.2 | 4.1 | 7% | 3 |
| K316E | K148E | 110.5 | 25.1 | 23% | 3 |
| K316S | K148S | 57.3 | 4.6 | 8% | 3 |
| K316M | K148M | 26.0 | 16.7 | 64% | 3 |
| E239S | E74S | 28.5 | 19.2 | 67% | 3 |
| E239A | E74A | 55.4 | 18.4 | 33% | 3 |
| E239R | E74R | 58.3 | 13.9 | 24% | 3 |
| E239K | E74K | 59.2 | 25.5 | 43% | 3 |
| H257F | H92F | 62.0 | 30.1 | 49% | 3 |
| H257Y | H92Y | 59.3 | 25.0 | 42% | 3 |
| H257E | H92E | 59.7 | 39.6 | 66% | 3 |
| H257S | H92S | 56.0 | 24.7 | 44% | 3 |
| T412A | T242A | 76.1 | 44.7 | 59% | 5 |
| T412V | T242V | 51.2 | 18.9 | 37% | 8 |
| E410N/T412A | E240N/T242A | 37.2 | 3.6 | 10% | 4 |
| E410N/T412V | E240N/T242V | 33.3 | 4.9 | 15% | 4 |
| E410Q | E240Q | 56.1 | 18.0 | 32% | 4 |
| E410S | E240S | 50.0 | 11.9 | 24% | 12 |
| E410A | E240A | 47.7 | 11.7 | 24% | 10 |
| E410D | E240D | 71.9 | 26.9 | 37% | 4 |
| N346D | N178D | 45.7 | 7.8 | 17% | 4 |
| Y155F/N346D | Y[155]F/N178D | 104.4 | 14.5 | 14% | 2 |
| N346Y | N178Y | 27.4 | 4.2 | 15% | 8 |
| Y345A | Y177A | 50.8 | 32.4 | 64% | 4 |
| Y345T | Y177T | 28.6 | 7.9 | 28% | 4 |
| T343R | T175R | 34.5 | 11.8 | 34% | 12 |
| T343E | T175E | 27.3 | 10.0 | 37% | 4 |
| T343Q | T175Q | 37.0 | 9.1 | 25% | 3 |
| F342I | F174I | 30.0 | 19.1 | 64% | 3 |
| T343R/Y345T | T175R/Y177T | 26.5 | 6.8 | 26% | 3 |
| R318Y/R338E | R150Y/R170E | 24.6 | 5.5 | 22% | 4 |
| Y259F/K265T/Y345T | Y94F/K98T/Y177T | 30.9 | 4.8 | 16% | 2 |
| K228N/I251S | K63N/I86S | 122.6 | 53.5 | 44% | 2 |
| K228N/R318Y/R338E/R403E/ | K63N/R150Y/R170E/R233E/ | 36.1 | 14.0 | 39% | 3 |
| E410N | E240N | | | | |
| Y155F/K228N/R318Y/R338E/ | Y[155]F/K63N/R150Y/R170E/ | 40.8 | 15.0 | 37% | 5 |
| R403E/E410N | R233E/E240N | | | | |
| D85N/K228N/R318Y/R338E/ | D[85]N/K63N/R150Y/R170E/ | 39.3 | 9.8 | 25% | 2 |
| R403E/E410N | R233E/E240N | | | | |
| I251S/R318Y/R338E/R403E/ | I86S/R150Y/R170E/R233E/ | 33.4 | 10.2 | 30% | 4 |
| E410N | E240N | | | | |
| D104N/K106S/I251S/R318Y/ | D[104]N/K[106]S/I86S/R150Y/ | 46.2 | 7.7 | 17% | 8 |
| R338E/R403E/E410N | R170E/R233E/E240N | | | | |
| Y155F/I251S/R318Y/R338E/ | D[104]N/K[106]S/I86S/R150Y/ | 43.3 | 7.0 | 16% | 2 |
| R403E/E410N | R170E/R233E/E240N | | | | |
| I251S/R318Y/R338E/E410N | I86S/R150Y/R170E/E240N | 16.1 | 2.7 | 17% | 10 |
| D104N/K106S/I251S/R318Y/ | D[104]N/K[106]S/I86S/R150Y/ | 24.3 | 8.6 | 35% | 3 |
| R338E/E410N | R170E/E240N | | | | |
| F314N/K316S | F145N/K148S | 635.1 | 569.9 | 90% | 2 |
| K247N/N249S/R318Y/R338E/ | K82N/N84S/R150Y/R170E/ | 39.2 | 8.3 | 21% | 6 |
| R403E/E410N | R233E/E240N | | | | |
| Y155F/K247N/N249S/R318Y/ | Y[155]F/K82N/N84S/R150Y/ | 36.3 | 12.8 | 35% | 10 |
| R338E/R403E/E410N | R170E/R233E/E240N | | | | |
| A103N/N105S/K247N/N249S/ | A[103]N/N[105]S/K82N/N84S/ | 28.0 | 9.5 | 34% | 6 |
| R318Y/R338E/R403E/E410N | R150Y/R170E/R233E/E240N | | | | |
| D104N/K106S/K247N/N249S/ | D[104]N/K[106]S/K82N/N84S/ | 59.0 | 0.6 | 1% | 2 |
| R318Y/R338E/R403E/E410N | R150Y/R170E/R233E/E240N | | | | |
| D104N/K106S/Y155F/K247N/ | D[104]N/K[106]S/Y[155] | 51.8 | 16.7 | 32% | 6 |
| N249S/R318Y/R338E/R403E/ | F/K82N/N84S/R150Y/R170E/ | | | | |
| E410N | R233E/E240N | | | | |
| K247N/N249S/R318Y/R338E/ | K82N/N84S/R150Y/R170E/ | 16.6 | 3.7 | 22% | 6 |
| E410N | E240N | | | | |
| Y155F/K247N/N249S/R318Y/ | Y[155]F/K82N/N84S/R150Y/ | 14.7 | 3.9 | 27% | 9 |
| R338E/E410N | R170E/E240N | | | | |
| R318Y/R338E/R403E/E410S | R150Y/R170E/R233E/E240S | 36.4 | 9.5 | 26% | 7 |
| R318Y/R338E/E410S | R150Y/R170E/E240S | 16.4 | 4.0 | 25% | 8 |
| K228N/K247N/N249S | K63N/K82N/N84S | 94.5 | 27.0 | 29% | 2 |
| D104N/K106S/Y155F/K228N/ | D[104]N/K[106]S/Y[155] | 75.3 | 26.4 | 35% | 2 |
| K247N/N249S | F/K63N/K82N/N84S | | | | |
| D104N/K106S/K228N/K247N/ | D[104]N/K[106]S/K63N/K82N/ | 77.1 | 18.3 | 24% | 5 |
| N249S | N84S | | | | |
| Y155F/K228N/K247N/N249S | Y[155]F/K63N/K82N/N84S | 79.2 | 27.6 | 35% | 2 |
| K228N/K247N/N249S/R318Y/ | K63N/K82N/N84S/R150Y/R170E/ | 49.7 | 15.6 | 31% | 17 |
| R338E/R403E/E410N | R233E/E240N | | | | |
| D104N/K106S/K228N/K247N/ | D[104]N/K[106]S/K63N/K82N/ | 53.3 | 12.2 | 23% | 7 |
| N249S/R318Y/R338E/R403E/ | N84S/R150Y/R170E/R233E/E240N | | | | |
| E410N | | | | | |
| Y155F/K228N/K247N/N249S/ | Y[155]F/K63N/K82N/N84S/ | 45.4 | 17.7 | 39% | 5 |
| R318Y/R338E/R403E/E410N | R150Y/R170/R233E/E240N | | | | |
| R318Y/R338E/R403E/E410N/ | R150Y/R170E/R233E/E240N/ | 48.3 | 16.2 | 33% | 6 |
| T412V | T242V | | | | |
| R318Y/R338E/R403E/E410N/ | R150Y/R170E/R233E/E240N/ | 34.4 | 10.0 | 29% | 6 |
| T412A | T242A | | | | |
| R318Y/R338E/R403E/T412A | R150Y/R170E/R233E/T242A | 67.5 | 11.6 | 17% | 4 |
| R318Y/R338E/T412A | R150Y/R170E/T242A | 23.5 | 5.3 | 22% | 6 |
| R318Y/R338E/E410N/T412V | R150Y/R170E/E240N/T242V | 23.6 | 12.3 | 52% | 11 |
| N260S/R318Y/R338E/R403E/ | N95S/R150Y/R170E/R233E/ | 72.4 | 20.2 | 28% | 2 |
| E410N | E240N | | | | |
| D104N/K106S/N260S/R318Y/ | D[104]N/K[106]S/N95S/R150Y/ | 61.1 | 0.0 | 0% | 2 |
| R338E/R403E/E410N | R170E/R233E/E240N | | | | |
| Y155F/N260S/R318Y/R338E/ | Y[155]F/N95S/R150Y/R170E/ | 83.9 | 4.4 | 5% | 2 |
| R403E/E410N | R233E/E240N | | | | |
| R318Y/R338E/N346D/R403E/ | R150Y/R170E/N178D/R233E/ | 77.7 | 20.9 | 27% | 2 |
| E410N | E240N | | | | |
| Y155F/R318Y/R338E/N346D/ | Y[155]F/R150Y/R170E/N178D/ | 100.0 | 15.6 | 16% | 2 |
| R403E/E410N | R233E/E240N | | | | |
| K247N/N249S/N260S | K82N/N84S/N95S | 114.1 | 0.0 | 0% | 2 |
| Y155F/K247N/N249S/N260S | Y[155]F/K82N/N84S/N95S | 96.5 | 5.5 | 6% | 2 |
| D104N/K106S/K247N/N249S/ | D[104]N/K[106]S/K82N/ | 61.2 | 14.1 | 23% | 2 |
| N260S | N84S/N95S | | | | |
| D104N/K106S/Y155F/K247N/ | D[104]N/K[106]S/Y[155] | 68.5 | 33.2 | 49% | 2 |
| N249S/N260S | F/K82N/N84S/N95S | | | | |
| K247N/N249S/N260S/R318Y/ | K82N/N84S/N95S/R150Y/ | 47.4 | 12.1 | 26% | 6 |
| R338E/R403E/E410N | R170E/R233E/E240N | | | | |
| Y155F/K247N/N249S/N260S/ | Y[155]F/K82N/N84S/N95S/ | 95.4 | 73.0 | 77% | 5 |
| R318Y/R338E/R403E/E410N | R150Y/R170E/R233E/E240N | | | | |
| Y155F/N260S/N346D | Y[155]F/N95S/N178D | 127.9 | 6.2 | 5% | 2 |
| R318Y/R338E/T343R/R403E/ | R150Y/R170E/T175R/R233E/ | 24.7 | 7.2 | 29% | 13 |
| E410N | E240N | | | | |
| Y155F/R318Y/R338E/T343R/ | Y[155]F/R150Y/R170E/ | 27.2 | 5.7 | 21% | 4 |
| R403E/E410N | T175R/R233E/E240N | | | | |
| D104N/K106S/R318Y/R338E/ | D[104]N/K[106]S/R150Y/ | 26.6 | 5.0 | 19% | 5 |
| T343R/R403E/E410N | R170E/T175R/R233E/E240N | | | | |
| R338E/T343R | R170E/T175R | 14.3 | 3.6 | 25% | 7 |
| T343R/N346Y | T175R/N178Y | 26.0 | 7.3 | 28% | 11 |
| R318Y/R338E/N346Y/R403E/ | R150Y/R170E/N178Y/R233E/ | 28.1 | 7.5 | 27% | 3 |
| E410N | E240N | | | | |
| R318Y/R338E/T343R/N346Y/ | R150Y/R170E/T175R/N178Y/ | 15.8 | 4.0 | 25% | 5 |
| R403E/E410N | R233E/E240N | | | | |
| T343R/N346D | T175R/N178D | 118.5 | 42.9 | 36% | 2 |
| R318Y/R338E/T343R/N346D/ | R150Y/R170E/T175R/N178D/ | 67.0 | 26.8 | 40% | 2 |
| R403E/E410N | R233E/E240N | | | | |
| R318Y/R338E/Y345A/R403E/ | R150Y/R170E/Y177A/R233E/ | 18.8 | 8.8 | 47% | 6 |
| E410N | E240N | | | | |
| R318Y/R338E/Y345A/N346D/ | R150Y/R170E/Y177A/N178D/ | 56.5 | 16.1 | 28% | 3 |
| R403E/E410N | R233E/E240N | | | | |
| Y155F/K247N/N249S/R318Y/ | Y[155]F/K82N/N84S/R150Y/ | 67.3 | 17.7 | 26% | 5 |
| R338E/R403E | R170E/R233E | | | | |
| K247N/N249S/R318Y/R338E/ | K82N/N84S/R150Y/R170E/ | 53.6 | 22.1 | 41% | 2 |
| R403E | R233E | | | | |
| Y155F/K247N/N249S/R318Y/ | Y[155]F/K82N/N84S/R150Y/ | 125.4 | 9.1 | 7% | 3 |
| R403E/E410N | R233E/E240N | | | | |
| K247N/N249S/R318Y/R403E/ | K82N/N84S/R150Y/R233E/ | 110.9 | 29.5 | 27% | 10 |
| E410N | E240N | | | | |
| Y155F/K247N/N249S/R338E/ | Y[155]F/K82N/N84S/R170E/ | 48.7 | 11.4 | 23% | 3 |
| R403E/E410N | R233E/E240N | | | | |
| K247N/N249S/R338E/R403E/ | K82N/N84S/R170E/R233E/ | 25.0 | 7.9 | 31% | 2 |
| E410N | E240N | | | | |
| R318Y/R338E/T343R/R403E | R150Y/R170E/T175R/R233E | 44.3 | 11.0 | 25% | 4 |
| Y155F/R318Y/R338E/T343R/ | Y[155]F/R150Y/R170E/ | 34.0 | 8.7 | 26% | 4 |
| R403E | T175R/R233E | | | | |
| R318Y/R338E/T343R/E410N | R150Y/R170E/T175R/E240N | 16.4 | 5.9 | 36% | 16 |
| Y155F/R318Y/R338E/T343R/ | Y[155]F/R150Y/R170E/ | 25.6 | 5.4 | 21% | 4 |
| E410N | T175R/E240N | | | | |
| R318Y/T343R/R403E/E410N | R150Y/T175R/R233E/ | 93.9 | 14.0 | 15% | 3 |
| | E240N | | | | |
| Y155F/R318Y/T343R/R403E/ | Y[155]F/R150Y/T175R/ | 34.0 | 7.7 | 23% | 2 |
| E410N | R233E/E240N | | | | |
| R338E/T343R/R403E/E410N | R170E/T175R/R233E/E240N | 34.7 | 14.3 | 41% | 2 |
| Y155F/R338E/T343R/R403E/ | Y[155]F/R170E/T175R/ | 25.9 | 8.2 | 32% | 4 |
| E410N | R233E/E240N | | | | |
| Y155F/K247N/N249S/R318Y/ | Y[155]F/K82N/N84S/ | 25.7 | 8.4 | 33% | 11 |
| R338E/T343R/R403E/E410N | R150Y/R170E/T175R/ | | | | |
| | R233E/E240N | | | | |
| K247N/N249S/R318Y/R338E/ | K82N/N84S/R150Y/R170E/ | 29.2 | 7.9 | 27% | 5 |
| T343R/R403E/E410N | T175R/R233E/E240N | | | | |
| K228N/I251S/R318Y/R338E/ | K63N/I86S/R150Y/R170E/ | 36.4 | 10.8 | 30% | 7 |
| R403E/E410N | R233E/E240N | | | | |
| Y155F/K228N/I251S/R318Y/ | Y[155]F/K63N/I86S/R150Y/ | 39.3 | 7.3 | 19% | 5 |
| R338E/R403E/E410N | R170E/R233E/E240N | | | | |
| N260S/R318Y/R338E/T343R/ | N95S/R150Y/R170E/T175R/ | 32.1 | 10.3 | 32% | 7 |
| R403E/E410N | R233E/E240N | | | | |
| Y155F/N260S/R318Y/R338E/ | Y[155]F/N95S/R150Y/ | 40.2 | 11.6 | 29% | 5 |
| T343R/R403E/E410N | R170E/T175R/R233E/E240N | | | | |
| K228N/K247N/N249S/R318Y/ | K63N/K82N/N84S/R150Y/ | 25.1 | 5.4 | 21% | 12 |
| R338E/T343R/R403E/E410N | R170E/T175R/R233E/E240N | | | | |
| Y155F/K228N/K247N/N249S/ | Y[155]F/K63N/K82N/N84S/ | 36.8 | 18.8 | 51% | 5 |
| R318Y/R338E/T343R/R403E/ | R150Y/R170E/T175R/R233E/ | | | | |
| E410N | E240N | | | | |
| Y155F/R338E/T343R/R403E | Y[155]F/R170E/T175R/R233E | 28.9 | 9.1 | 31% | 5 |
| R338E/T343R/R403E | R170E/T175R/R233E | 23.5 | 6.5 | 28% | 2 |
| Y155F/R338E/T343R/R403E/ | Y[155]F/R170E/T175R/ | 23.9 | 3.1 | 13% | 6 |
| E410S | R233E/E240S | | | | |
| Y155F/N260S/R338E/T343R/ | Y[155]F/N95S/R170E/ | 69.2 | 27.8 | 40% | 6 |
| R403E | T175R/R233E | | | | |
| Y155F/I251S/R338E/T343R/ | Y[155]F/I86S/R170E/ | 19.6 | 3.4 | 17% | 2 |
| R403E | T175R/R233E | | | | |
| R318Y/R338E/T343R/R403E/ | R150Y/R170E/T175R/ | 19.0 | 6.4 | 33% | 14 |
| E410S | R233E/E240S | | | | |
| Y155F/K247N/N249S/T343R/ | Y[155]F/K82N/N84S/ | 59.6 | 20.3 | 34% | 4 |
| R403E | T175R/R233E | | | | |
| Y155F/K247N/N249S/R318Y/ | Y[155]F/K82N/N84S/ | 36.5 | 3.5 | 10% | 2 |
| R338E/T343R/R403E | R150Y/R170E/T175R/R233E | | | | |
| K247N/N249S/R318Y/R338E/ | K82N/N84S/R150Y/R170E/ | 28.4 | 17.8 | 63% | 4 |
| T343R/R403E | T175R/R233E | | | | |
| Y155F/K247N/N249S/R338E/ | Y[155]F/K82N/N84S/R170E/ | 26.4 | 1.3 | 5% | 2 |
| T343R/R403E/E410N | T175R/R233E/E240N | | | | |
| K247N/N249S/R338E/T343R/ | K82N/N84S/R170E/T175R/ | 25.1 | 3.0 | 12% | 2 |
| R403E/E410N | R233E/E240N | | | | |
| Y155F/K247N/N249S/R318Y/ | Y[155]F/K82N/N84S/R150Y/ | 26.3 | 8.8 | 33% | 2 |
| R338E | R170E | | | | |
| Y155F/K247N/N249S/R318Y/ | Y[155]F/K82N/N84S/R150Y/ | 42.1 | 12.8 | 30% | 4 |
| T343R | T175R | | | | |
| Y155F/K247N/N249S/R318Y/ | Y[155]F/K82N/N84S/R150Y/ | 108.6 | 22.3 | 21% | 3 |
| R403E | R233E | | | | |
| Y155F/K247N/N249S/R318Y/ | Y[155]F/K82N/N84S/R150Y/ | 48.8 | 12.8 | 26% | 3 |
| E410N | E240N | | | | |
| Y155F/K247N/N249S/R338E/ | Y[155]F/K82N/N84S/R170E/ | 40.9 | 12.9 | 31% | 2 |
| R403E | R233E | | | | |
| Y155F/K247N/N249S/R338E/ | Y[155]F/K82N/N84S/R170E/ | 15.3 | 4.0 | 26% | 2 |
| T343R | T175R | | | | |
| Y155F/K247N/N249S/R318Y/ | Y[155]F/K82N/N84S/R150Y/ | 17.7 | 6.0 | 34% | 4 |
| R338E/T343R/E410N | R170E/T175R/E240N | | | | |
| K247N/N249S/R318Y/R338E/ | K82N/N84S/R150Y/R170E/ | 32.8 | 22.9 | 70% | 6 |
| T343R/E410N | T175R/E240N | | | | |
| Y155F/K247N/N249S/R318Y/ | Y[155]F/K82N/N84S/R150Y/ | 60.6 | 26.0 | 43% | 2 |
| T343R/R403E/E410N | T175R/R233E/E240N | | | | |
| K247N/N249S/R318Y/T343R/ | K82N/N84S/R150Y/T175R/ | 80.5 | 31.3 | 39% | 7 |
| R403E/E410N | R233E/E240N | | | | |
| Y155F/K247N/N249S/R338E/ | Y[155]F/K82N/N84S/R170E/ | 17.7 | 7.6 | 43% | 8 |
| E410N | E240N | | | | |
| Y155F/K247N/N249S/R318Y/ | Y[155]F/K82N/N84S/R150Y/ | 60.5 | 7.5 | 12% | 2 |
| T343R/R403E | T175R/R233E | | | | |
| K247N/N249S/R318Y/T343R/ | K82N/N84S/R150Y/T175R/ | 105.3 | 25.8 | 25% | 9 |
| R403E | R233E | | | | |
| Y155F/K247N/N249S/R318Y/ | Y[155]F/K82N/N84S/ | 38.1 | 29.6 | 78% | 4 |
| T343R/E410N | R150Y/T175R/E240N | | | | |
| K247N/N249S/R318Y/T343R/ | K82N/N84S/R150Y/T175R/ | 40.1 | 25.9 | 64% | 4 |
| E410N | E240N | | | | |
| Y155F/K247N/N249S/R338E/ | Y[155]F/K82N/N84S/ | 25.1 | 2.8 | 11% | 2 |
| T343R/R403E | R170E/T175R/R233E | | | | |
| K247N/N249S/R338E/T343R/ | K82N/N84S/R170E/T175R/ | 26.3 | 3.5 | 13% | 2 |
| R403E | R233E | | | | |
| Y155F/K247N/N249S/R338E/ | Y[155]F/K82N/N84S/ | 27.0 | 7.1 | 26% | 2 |
| T343R/E410N | R170E/T175R/E240N | | | | |
| K247N/N249S/R338E/T343R/ | K82N/N84S/R170E/T175R/ | 27.5 | 11.1 | 40% | 5 |
| E410N | E240N | | | | |
| Y155F/K247N/N249S/T343R/ | Y[155]F/K82N/N84S/ | 52.0 | 5.4 | 10% | 2 |
| R403E/E410N | T175R/R233E/E240N | | | | |
| K247N/N249S/T343R/R403E/ | K82N/N84S/T175R/R233E/ | 60.0 | 13.9 | 23% | 2 |
| E410N | E240N | | | | |
| Y155F/R318Y/R338E/T343R | Y[155]F/R150Y/R170E/ | 24.2 | 8.8 | 36% | 7 |
| | T175R | | | | |
| R318Y/R338E/T343R | R150Y/R170E/T175R | 30.0 | 1.5 | 5% | 2 |
| Y155F/R318Y/T343R/R403E | Y[155]F/R150Y/T175R/ | 72.7 | 29.5 | 41% | 2 |
| | R233E | | | | |
| Y155F/T343R/R403E/E410N | Y[155]F/T175R/R233E/ | 44.6 | 1.9 | 4% | 2 |
| | E240N | | | | |
| Y155F/K247N/N249S/R318Y/ | Y[155]F/K82N/N84S/ | 27.6 | 13.2 | 48% | 7 |
| R338E/T343R | R150Y/R170E/T175R | | | | |
| K247N/N249S/R318Y/R338E/ | K82N/N84S/R150Y/R170E/ | 24.4 | 13.5 | 55% | 4 |
| T343R | T175R | | | | |
| Y155F/K247N/N249S/T343R/ | Y[155]F/K82N/N84S/ | 34.4 | 20.0 | 58% | 5 |
| E410N | T175R/E240N | | | | |
| Y155F/K247N/N249S/R403E/ | Y[155]F/K82N/N84S/ | 131.3 | 53.1 | 40% | 7 |
| E410N | R233E/E240N | | | | |
| Y155F/R338E/T343R/E410N | Y[155]F/R170E/T175R/ | 22.4 | 13.8 | 62% | 6 |
| | E240N | | | | |
| R338E/T343R/E410N | R170E/T175R/E240N | 35.5 | 15.9 | 45% | 2 |
| Y155F/R318Y/T343R/E410N | Y[155]F/R150Y/T175R/ | 40.3 | 22.9 | 57% | 4 |
| | E240N | | | | |
| R318Y/T343R/E410N | R150Y/T175R/E240N | 52.3 | 2.4 | 5% | 2 |
| K228N/R318Y/R338E/T343R/ | K63N/R150Y/R170E/ | 40.3 | 9.6 | 24% | 3 |
| R403E/E410N | T175R/R233E/E240N | | | | |
| K228N/K247N/N249S/R318Y/ | K63N/K82N/N84S/R150Y/ | 44.4 | 23.7 | 53% | 3 |
| R338E/T343R/R403E | R170E/T175R/R233E | | | | |
| K228N/247N/N249S/R318Y/ | K63N/K82N/N84S/R150Y/ | 38.1 | 10.4 | 27% | 2 |
| R338E/T343R/E410N | R170E/T175R/E240N | | | | |
| K228N/K247N/N249S/R318Y/ | K63N/K82N/N84S/R150Y/ | 125.1 | 36.4 | 29% | 3 |
| T343R/R403E/E410N | T175R/R233E/E240N | | | | |

†produced in BHK-21 cells;
*80% glycosylated form of E410N

### Example 5

### Determination of the Inhibition of FIXa by the Antithrombin/Heparin Complex

[0586] Inhibition of wild-type FIXa or FIXa variants by the Antithrombin/heparin complex (AT-III/heparin) was assessed by measuring the level of inhibition by various concentrations of AT-III/heparin on the catalytic activity of FIXa towards a small molecule substrate, Mesyl-D-CHG-Gly-Arg-AMC (Pefafluor FIXa; Pentapharm). A K_{0.5} value is determined for each FIXa variant tested, which corresponds to the molar concentration of AT-III that was required for 50% inhibition (IC₅₀) of the catalytic activity of a FIXa variant under the predefined conditions of the assay. Inhibition reactions were performed in the presence of low molecular weight heparin (LMWH; Calbiochem) or full-length unfractionated heparin (UFH; Calbiochem), the latter requiring modified protocol conditions to account for an increase in the rate of inhibition. The apparent second-order rate constant (kₐₚₚ) for the inhibition of wild-type FIXa or FIXa variants by the AT-III/UFH complex was also directly evaluated using a modified protocol, in which the time of incubation with the AT-III/UFH complex was varied.

### A. Inhibition of FIXa by the Antithrombin/LMWH Complex

[0587] For inhibition reactions in the presence of LMWH, a 200 nM solution of AT-III/LMWH (final 2 μM LMWH) was prepared by dilution of a 20 μM stock of plasma purified human AT-III (Molecular Innovations) into a solution of 2 μM LMWH in a 1.2 mL volume of 1× Buffer A (50 mM Tris, 100 mM NaCl, 10 mM CaCl₂), 0.01% Tween-20, pH 7.4). This solution of AT-III/LMWH was for use as the highest concentration in the assay. AT-III/LMWH solutions were incubated for at least 30 minutes at room temperature and then serially diluted 1.5-fold in a 96 deep-well polypropylene plate with a final volume of 400 μL 1× Buffer A that contained 2 μM LMWH, resulting in dilutions of 200 nM, 133.3, nM 88.9 nM, 59.3 nM, 39.5 nM, 26.3 nM, 17.6 nM and 0 nM (i.e., rows A-H). A total of 25 μL was aliquoted into their respective rows of a 96-well V-bottom storage plate to fill all columns (i.e. 1-12). FIXa variants were initially diluted to 100 nM in 1× Buffer A. Subsequently, 36 μL of each 100 nM FIXa variant was diluted to a concentration of 1.8 nM in 2.0 mL of 1× Buffer A and then 60 μL of this solution was aliquoted into a 96-well V-bottom storage plate according to a predefined plate map (4 FIXa variants per plate).

[0588] Assay reactions were initiated using a BioMek FX liquid handling system programmed to dispense 25 μL of the FIXa solutions into the plates containing 25 of each dilution of AT-III/LMWH per well for a total of two duplicate assay plates for each FIXa variant. The final inhibition assay conditions were: 0.9 nM FIXa and AT-III dilutions ranging from 0 to 100 nM in 1 μM LMWH. Inhibition reactions were further incubated for 1 minute at room temperature (˜25° C.) before a 25 μL aliquot of the reaction was transferred by the BioMek FX to a 96-well black half-area plate containing 25 μL of 1.6 mM Mesyl-D-CHG-Gly-Arg-AMC per well in assay Buffer B (50 mM Tris, 100 mM NaCl, 10 mM CaCl₂), 0.01% Tween-20, pH 7.4, 60% ethylene glycol). Polybrene (hexadimethrine bromide) at a final concentration of 5 mg/mL was added in Buffer B to quench the AT-III/LMWH reaction. Residual activity of FIXa was assessed by following the initial rates of substrate cleavage for 60 minutes in a fluorescence reader set to 25° C. The final assay conditions for determination of residual activity are 0.45 nM FIXa variant, 0.8 mM Mesyl-D-CHG-Gly-Arg-AMC, 30% ethylene glycol and 5 mg/mL polybrene in 50 mM Tris, 100 mM NaCl, 10 mM CaCl₂), 0.01% Tween-20, pH 7.4.

[0589] To determine the degree of inhibition by AT-III/LMWH for FIXa or FIXa variants, raw data collected with the SoftMax Pro application (Molecular Devices) were exported as .XML files. Further non-linear data analyses were performed with XLfit4, a software package for automated curve fitting and statistical analysis within the Microsoft Excel spreadsheet environment (IDBS Software) or directly within the ActivityBase software package using the XE Runner data analysis module (IDBS Software). The template was used to calculate the AT-III dilution series, ratio of AT-III to FIXa, and the Vi/Vo ratios for each FIXa replicate at each experimental AT-III concentration. The spreadsheet template was used to calculate the AT-III dilution series, ratio of AT-III to FIXa, and the Vi/Vo ratios for each FIXa replicate at each experimental AT-III concentration. Non-linear regression analyses of residual FIXa activity (expressed as Vi/Vo) versus AT-III concentration was processed using XLfit4 and a hyperbolic inhibition equation of the form ((C+(Amp*(1−(X/(K_{0.5}+X))))); where C=the offset (fixed at 0 to permit extrapolation of data sets that did not reach 100% inhibition during the course of the assay), Amp=the amplitude of the fit and K_{0.5}, which corresponds to the concentration of AT-III required for half-maximal inhibition under the assay conditions. For several FIXa variants, AT-III/LMWH inhibited less than 10-15% of the total protease activity at the highest tested concentration of AT-III, representing an upper limit of detection for the assay under standard screening conditions. Variants with less than 10% maximal inhibition were therefore assigned a lower limit K_{0.5} value of 999 nM and in most cases are expected to have AT-III resistances much greater than the reported value.

[0590] Table 29 provides the results of the assays that were performed using AT-III/LMWH. The results are presented both as the fitted K_{0.5} parameter and as a representation of the extent of AT-III resistance for each variant compared to the wild-type FIXa expressed as a ratio of their fitted K_{0.5} values (K_{0.5} variant/K_{0.5} wild-type). Where the K_{0.5} parameter of the FIXa variant was compared to wild-type FIXa, it was compared to a recombinant wild-type FIXa polypeptide that was expressed and purified using the same conditions as used for the variant FIXa polypeptides to ensure that any differences in activity were the result of the mutation(s), and not the result of differences in, for example, post-translational modifications associated with different expression systems. Thus, the wild-type FIXa polypeptide used for comparison was the recombinant wild-type FIXa generated from cloning the FIX gene set forth in SEQ ID NO:1 and expressed from CHOX cells as a polypeptide with an amino acid sequence set forth in SEQ ID NO:3, as described in Example 1 (i.e., Catalyst Biosciences WT FIX polypeptide). Several FIXa variants exhibited greater than 20-fold increased resistance to AT-III compared to wild-type FIXa (Catalyst Biosciences WT FIXa). For example, FIXa-R318A/R403A, FIXa-R318E/R340E, FIXa-R318A, FIXa-R318E, FIXa-K400E, FIXa-R338E/R403E and FIXa-K400A/R403A are among the group that exhibited significant resistance to AT-III.

TABLE 29
Inhibition of FIXa variants by AT-III/LMWH

| Mutation | Mutation | K_{0.5} | ±S.D. | | K_{0.5-mut}/ | |
|---|---|---|---|---|---|---|
| (Mature FIX Numbering) | (Chymotrypsin Numbering) | (nM) | (nM) | % CV | K_{0.5-wt} | n |
| Plasma Purified FIXa | Plasma Purified FIXa | 20.2 | 6.7 | 33% | 0.7 | 3 |
| BeneFIX ® (T148A) | BeneFIX ® (T[148]A) | 27.3 | 4.7 | 17% | 0.9 | 2 |
| Catalyst Biosciences WT | Catalyst Biosciences WT | 29.4 | 7.3 | 25% | 1.0 | 10 |
| A103N/N105S | A[103]N/N[105]S | 31.1 | n/a | n/a | 1.1 | 1 |
| D104N/K106S | D[104]N/K[106]S | 26.1 | n/a | n/a | 0.9 | 1 |
| K106N/V108S | K[106]N/V[108]S | 47.7 | n/a | n/a | 1.6 | 1 |
| D85N | D[85]N | 33.1 | n/a | n/a | 1.1 | 1 |
| T148A | T[148]A | 22.9 | 1.7 | 8% | 0.8 | 4 |
| D203N/F205T | D39N/F41T | 154.1 | 50.1 | 33% | 5.2 | 4 |
| I251S | I86S | 22.6 | n/a | n/a | 0.8 | 1 |
| D85N/I251S | D[85]N/I86S | 28.3 | n/a | n/a | 1.0 | 1 |
| D85N/D104N/K106S/I251S | D[85]N/D[104]N/K[106]S/I86S | 32.1 | n/a | n/a | 1.1 | 1 |
| A262S | A95bS | 25.3 | n/a | n/a | 0.9 | 1 |
| K413N | K243N | 34.2 | n/a | n/a | 1.2 | 1 |
| E410N | E240N | 24.8 | 7.8 | 31% | 0.8 | 3 |
| E239N | E74N | 191.8 | 61.0 | 32% | 6.5 | 3 |
| T241N/H243S | T76N/H78S | 35.4 | n/a | n/a | 1.2 | 1 |
| K247N/N249S | K82N/N84S | 23.1 | n/a | n/a | 0.8 | 1 |
| L321N | L153N | 39.0 | n/a | n/a | 1.3 | 1 |
| F314N/H315S | F145N/H147S | 191.8 | 59.8 | 31% | 6.5 | 3 |
| S319N/L321S | S151N/L153S | 113.4 | n/a | n/a | 3.9 | 1 |
| N260S | N95S | 64.6 | n/a | n/a | 2.2 | 1 |
| Y284N | Y117N | 36.7 | n/a | n/a | 1.2 | 1 |
| R318A | R150A | 896.2 | 189.2 | 21% | 30.5 | 2 |
| R318E | R150E | 861.1 | 21.8 | 3% | 29.3 | 2 |
| R318Y | R150Y | 395.1 | 6.3 | 2% | 13.5 | 2 |
| R312Q | R143Q | 52.7 | 5.1 | 10% | 1.8 | 2 |
| R312A | R143A | 51.9 | 1.3 | 3% | 1.8 | 2 |
| R312Y | R143Y | 323.0 | 13.7 | 4% | 11.0 | 2 |
| R312L | R143L | 25.5 | 2.9 | 11% | 0.9 | 2 |
| V202M | V38M | 20.3 | 5.1 | 25% | 0.7 | 2 |
| V202Y | V38Y | 27.2 | 6.9 | 25% | 0.9 | 2 |
| D203M | D39M | 18.6 | 6.9 | 37% | 0.6 | 2 |
| D203Y | D39Y | 31.1 | 0.3 | 1% | 1.1 | 2 |
| A204M | A40M | 45.8 | 11.1 | 24% | 1.6 | 2 |
| A204Y | A40Y | 43.4 | 22.3 | 51% | 1.5 | 2 |
| K400A/R403A | K230A/R233A | 585.0 | 160.5 | 27% | 19.9 | 2 |
| K400E/R403E | K230E/R233E | 299.0 | 206.5 | 69% | 10.2 | 2 |
| R403A | R233A | 164.3 | 88.7 | 54% | 5.6 | 2 |
| R403E | R233E | 264.2 | 80.9 | 31% | 9.0 | 2 |
| K400A | K230A | 384.0 | 121.1 | 32% | 13.1 | 2 |
| K400E | K230E | 614.8 | 71.4 | 12% | 20.9 | 2 |
| K293E | K126E | 290.2 | 42.1 | 15% | 9.9 | 2 |
| K293A | K126A | 194.1 | 38.0 | 20% | 6.6 | 2 |
| R333A | R165A | 225.7 | 72.7 | 32% | 7.7 | 2 |
| R333E | R165E | 345.6 | 1.7 | 0% | 11.8 | 2 |
| R338A | R170A | 56.2 | 8.4 | 15% | 1.9 | 2 |
| R338E | R170E | 238.4 | n/a | n/a | 8.1 | 1 |
| R338A/R403A | R170A/R233A | 418.5 | 150.9 | 36% | 14.2 | 2 |
| R338E/R403E | R170E/R233E | 601.6 | 241.5 | 40% | 20.5 | 2 |
| K293A/R403A | K126A/R233A | 486.3 | 114.9 | 24% | 16.6 | 2 |
| K293E/R403E | K126E/R233E | 342.0 | 4.9 | 1% | 11.6 | 2 |
| K293A/R338A/R403A | K126A/R170A/R233A | 497.1 | 85.9 | 17% | 16.9 | 2 |
| K293E/R338E/R403E | K126E/R170E/R233E | 418.5 | 150.9 | 36% | 14.2 | 2 |
| R318A/R403A | R150A/R233A | 999.0 | n/a | n/a | 34.0 | 2 |
| R318E/R403E | R150E/R233E | 999.0 | n/a | n/a | 34.0 | 2 |

* A K_{0.5} value of 999 nM indicates the lower limit value for those variants with less than 10% inhibition under the conditions of the assay.

### B. Inhibition of FIXa by the Antithrombin/UFH Complex

[0591] Additional experiments were performed to assess the inhibition of FIXa variants by AT-III/UFH (unfractionated full-length heparin) using the same assay as described above with minor modifications. Full-length, unfractionated heparin (Calbiochem) was used instead of low molecular weight heparin (LMWH) to observe the effects of FIXa variant mutations on the increased rate of the inhibition reaction due to the “templating” effect provided by longer heparin chains (see e.g., Olson et al. (2004) J. Thromb. Haemost. 92(5), 929-939).

[0592] For inhibition reactions in the presence of UFH, a 70 nM, 600 nM, 2000 nM, 6000 nM or 10000 nM solution of AT-III/UFH (final 1 μM UFH) was prepared by dilution of a 20 μM stock of plasma purified human AT-III (Molecular Innovations) into a solution of excess UFH (2 to 20 μM) in a 1.4 mL volume of 1× Buffer A (50 mM Tris, 100 mM NaCl, 10 mM CaCl₂), 0.01% Tween-20, pH 7.4). AT-III/UFH solutions were also incubated for 30 minutes at room temperature before being serially diluted 1.5-fold in a 96 deep-well polypropylene plate with a final volume of 460 μL 1× Buffer A containing 1 μM UFH. The final dilutions of AT-III for the modified assay were dependent on the starting concentration of AT-III and ranged from 70 nM-0 nM, 600 nM-0 nM, 100 nM-0 nM or 5000 nM-0 nM (i.e., rows A-H). Those variants, which showed increased resistance to AT-III inhibition under the standard conditions, were further tested using higher concentrations of AT-III. A total of 35 μL of each AT-III dilution was aliquoted into their respective rows of a 96-well V-bottom storage plate to fill all columns (i.e., 1-12). FIXa variants were initially diluted to 100 nM in 1× Buffer A. Subsequently, 15 μL of each 100 nM FIXa variant was diluted to a concentration of 0.6 nM in 2.0 mL of 1× Buffer A and then 70 μL of this solution was aliquoted into a 96-well V-bottom storage plate according to the same predefined plate map (4 FIXa variants per plate).

[0593] Assay reactions were initiated using a BioMek FX liquid handling system programmed to dispense 35 μL of the FIXa solutions into the plates containing 35 of each dilution of AT-III/heparin per well for a total of two duplicate assay plates for each FIXa variant. The final inhibition assay conditions were: 0.3 nM FIXa and AT-III dilutions ranging from 35 nM to 0 nM, 300 nM to 0 nM, 1000 nM to 0 nM, 3000 nM to 0 nM or 5000 nM to 0 nM in UFH ranging from 1 μM to 10 μM, depending of the highest AT-III concentration so that the heparin remained in excess. Inhibition reactions were further incubated for 10 seconds at room temperature (˜25° C.) before a 40 μL aliquot of the reaction was transferred by the BioMek FX to a 96-well black half-area plate containing 20 μL of 2.5 mM Mesyl-D-CHG-Gly-Arg-AMC per well in assay Buffer C (50 mM Tris, 100 mM NaCl, 10 mM CaCl₂), 0.01% Tween-20, pH 7.4, 82% ethylene glycol and 5 mg/mL polybrene). Polybrene (hexadimethrine bromide) at a final concentration of 5 mg/mL was added to Buffer C to quench the AT-III/UFH reaction. Residual activity of FIXa was assessed by following the initial rates of substrate cleavage for 60 minutes in a fluorescence reader set to 25° C. The final assay conditions for determination of residual activity were 0.2 nM FIXa variant, 0.83 mM Mesyl-D-CHG-Gly-Arg-AMC, 30% ethylene glycol and 5 mg/mL polybrene in 50 mM Tris, 100 mM NaCl, 10 mM CaCl₂), 0.01% Tween-20, pH 7.4. Data analyses were performed as described above for AT-III/LMWH inhibition assays.

[0594] As found with LMWH, AT-III/UFH inhibited less than 10-15% of the of the total protease activity for a number of FIXa variants at the highest tested concentrations of AT-III, thus representing an upper limit of detection for the assay under standard screening conditions. These variants with less than 10% maximal inhibition were therefore assigned a lower limit K_{0.5} value of 999 nM and in most cases are expected to have AT-III resistances much greater than the reported value. Several FIXa variants that were initially given a K_{0.5} value of 999 nM were retested at higher AT-III concentrations, expanding the sensitivity of the assay and providing clear levels of AT-III resistance. If these variants still maintained less than 10% maximal inhibition at the highest test AT-III concentrations (1000 nM to 5000 nM) a lower limit K_{0.5} value of 9999 nM was assigned, thus these variants are expected to have AT-III resistances much greater than the reported value.

[0595] Tables 30-31 provide the results of the assays that were performed using AT-III/UFH. Table 31 reflects data for additional FIXa variants and provide new overall averages calculated to include additional experimental replicates (n) for FIXa variants in Table 30. The results are presented both as the fitted K_{0.5} parameter and as a representation of the extent of AT-III resistance for each variant compared to the wild-type FIXa expressed as a ratio of their fitted K_{0.5} values (K_{0.5} variant/K_{0.5} wild-type). Several FIXa variants exhibited greater than 100 to 500-fold increased resistance to AT-III compared to wild-type FIXa. For example, FIXa-R318A/R403A, FIXa-R318A, FIXa-R318Y, FIXa-R338A/R403A FIXa-D203N/F205T/R318Y, FIXa-R318Y/R338E/R403E, FIXa-R318Y/R338E/R403E, FIXa-R318Y/R338E/E410N, R318Y/R338E/T343R/N346Y/R403E/E410N and FIXa-R318Y/R403E/E410N are among this group, which exhibited significant resistance to AT-III.

TABLE 30
Inhibition of FIXa variants by AT-III/UFH

| Mutation | Mutation | K_{0.5} | ±S.D. | | K_{0.5-mut}/ | |
|---|---|---|---|---|---|---|
| (Mature FIX Numbering) | (Chymotrypsin Numbering) | (nM) | (nM) | % CV | K_{0.5-wt} | n |
| BeneFIX ® Coagulation | BeneFIX ® Coagulation | 18 | 8 | 44% | 0.9 | 51 |
| FIX (T148A) | FIX (T[148]A) | | | | | |
| Plasma Purified FIXa | Plasma Purified FIXa | 30 | 4 | 14% | 1.6 | 5 |
| Catalyst Biosciences WT | Catalyst Biosciences WT | 19 | 7 | 34% | 1.0 | 15 |
| N157D | N[157]D | 17 | 4 | 23% | 0.9 | 2 |
| Y155F | Y[155]F | 13 | 0 | 1% | 0.7 | 2 |
| A103N/N105S/Y155F | A[103]N/N[105]S/Y[155]F | 11 | 6 | 49% | 0.6 | 2 |
| D104N/K106S/Y155F | D[104]N/K[106]S/Y[155]F | 6 | 2 | 33% | 0.3 | 2 |
| A103N/N105S | A[103]N/N[105]S | 20 | 3 | 14% | 1.0 | 2 |
| D104N/K106S | D[104]N/K[106]S | 20 | 2 | 9% | 1.0 | 2 |
| K106N/V108S | K[106]N/V[108]S | 24 | 0 | 1% | 1.2 | 2 |
| D85N | D[85]N | 17 | 3 | 15% | 0.9 | 4 |
| T148A | T[148]A | 21 | 8 | 39% | 1.1 | 10 |
| K5A | K[5]A | 22 | 3 | 15% | 1.2 | 2 |
| D64N | D[64]N | 18 | 0 | 1% | 0.9 | 2 |
| D64A | D[64]A | 16 | 2 | 12% | 0.8 | 2 |
| N167D | N[167]D | 12 | 2 | 14% | 0.6 | 2 |
| N167Q | N[167]Q | 12 | 1 | 8% | 0.6 | 2 |
| S61A | S[61]A | 19 | 3 | 18% | 1.0 | 2 |
| S53A | S[53]A | 27 | 4 | 16% | 1.4 | 2 |
| T159A | T[159]A | 33 | 7 | 23% | 1.7 | 2 |
| T169A | T[169]A | 17 | 6 | 36% | 0.9 | 2 |
| T172A | T[172]A | 16 | 3 | 21% | 0.8 | 2 |
| T179A | T[179]A | 24 | 2 | 7% | 1.2 | 2 |
| Y155H | Y[155]H | 25 | 4 | 15% | 1.3 | 2 |
| Y155Q | Y[155]Q | 23 | 0 | 1% | 1.2 | 2 |
| S158A | S[158]A | 20 | 1 | 5% | 1.0 | 2 |
| S158D | S[158]D | 15 | 2 | 16% | 0.8 | 2 |
| S158E | S[158]E | 14 | 1 | 10% | 0.7 | 2 |
| N157Q | N[157]Q | 16 | 2 | 11% | 0.8 | 2 |
| D203N/F205T | D39N/F41T | 271 | 51 | 19% | 14.0 | 5 |
| D85N/D203N/F205T | D[85]N/D39N/F41T | 587 | 65 | 11% | 30.3 | 2 |
| K228N | K63N | 29 | 13 | 46% | 1.5 | 6 |
| D85N/K228N | D[85]N/K63N | 34 | 3 | 7% | 1.7 | 2 |
| A103N/N105S/K228N | A[103]N/N[105]S/K63N | 46 | 17 | 36% | 2.4 | 2 |
| D104N/K106S/K228N | D[104]N/K[106]S/K63N | 41 | 21 | 52% | 2.1 | 2 |
| Y155F/K228N | Y[155]F/K63N | 15 | n.d. | n.d. | 0.8 | 1 |
| D104N/K106S/Y155F/K228N | D[104]N/K[106]S/Y[155]F/K63N | 49 | 5 | 9% | 2.5 | 2 |
| I251S | I86S | 28 | 8 | 28% | 1.4 | 4 |
| D85N/I251S | D[85]N/I86S | 19 | 6 | 30% | 1.0 | 2 |
| D85N/D104N/K106S/I251S | D[85]N/D[104]N/K[106]S/I86S | 28 | 11 | 41% | 1.4 | 2 |
| A103N/N105S/I251S | A[103]N/N[105]S/I86S | 42 | 14 | 33% | 2.2 | 3 |
| D104N/K106S/I251S | D[104]N/K[106]S/I86S | 32 | 5 | 16% | 1.6 | 2 |
| Y155F/I251S | Y[155]F/I86S | 18 | 3 | 19% | 0.9 | 2 |
| A262S | A95bS | 25 | 5 | 21% | 1.3 | 2 |
| K413N | K243N | 27 | 13 | 48% | 1.4 | 2 |
| E410N | E240N | 9 | 2 | 27% | 0.5 | 4 |
| E239N | E74N | 132 | 21 | 16% | 6.8 | 2 |
| T241N/H243S | T76N/H78S | 21 | 12 | 56% | 1.1 | 2 |
| K247N/N249S | K82N/N84S | 22 | 4 | 18% | 1.1 | 4 |
| Y155F/K247N/N249S | Y[155]F/K82N/N84S | 13 | 3 | 24% | 0.7 | 4 |
| A103N/N105S/K247N/N249S | A[103]N/N[105]S/K82N/N84S | 53 | 29 | 55% | 2.7 | 4 |
| D104N/K106S/K247N/N249S | D[104]N/K[106]S/K82N/N84S | 19 | 2 | 9% | 1.0 | 2 |
| D104N/K106S/Y155F/K247N/ | D[104]N/K[106]S/Y[155]F/K82N/ | 27 | 2 | 9% | 1.4 | 2 |
| N249S | N84S | | | | | |
| L321N | L153N | 25 | 6 | 25% | 1.3 | 2 |
| F314N/H315S | F145N/H147S | 104 | 27 | 26% | 5.4 | 4 |
| S319N/L321S | S151N/L153S | 65 | 11 | 17% | 3.4 | 2 |
| N260S | N95S | 312 | 283 | 91% | 16.1 | 13 |
| D104N/K106S/N260S | D[104]N/K[106]S/N95S | 228 | 82 | 36% | 11.8 | 2 |
| Y155F/N260S | Y[155]F/N95S | 77 | 16 | 21% | 4.0 | 2 |
| D104N/K106S/Y155F/N260S | D[104]N/K[106]S/Y[155]F/N95S | 292 | 37 | 13% | 15.1 | 2 |
| Y284N | Y117N | 41 | 25 | 63% | 2.1 | 5 |
| R318N/A320S | R150N/A152S | 999 | 0 | 0% | 51.7 | 2 |
| R318A | R150A | 4145 | 1297 | 31% | 214.3 | 2 |
| R318E | R150E | 10000 | 0 | 0% | 517.0 | 2 |
| R318Y | R150Y | 1976 | 430 | 22% | 102.2 | 2 |
| R312Q | R143Q | 33 | 9 | 26% | 1.7 | 2 |
| R312A | R143A | 31 | 0 | 1% | 1.6 | 2 |
| R312Y | R143Y | 2499 | 350 | 14% | 129.2 | 2 |
| R312L | R143L | 17 | 1 | 5% | 0.9 | 2 |
| V202M | V38M | 14 | 2 | 14% | 0.7 | 2 |
| V202Y | V38Y | 18 | 3 | 14% | 0.9 | 2 |
| D203M | D39M | 11 | 0 | 1% | 0.6 | 2 |
| D203Y | D39Y | 16 | 3 | 21% | 0.8 | 2 |
| A204M | A40M | 29 | 3 | 9% | 1.5 | 2 |
| A204Y | A40Y | 24 | 1 | 3% | 1.2 | 2 |
| K400A/R403A | K230A/R233A | 999 | 0 | 0% | 51.7 | 2 |
| K400E/R403E | K230E/R233E | 999 | 0 | 0% | 51.7 | 2 |
| R403A | R233A | 190 | 34 | 18% | 9.8 | 4 |
| R403E | R233E | 731 | 14 | 2% | 37.8 | 2 |
| K400A | K230A | 114 | 3 | 3% | 5.9 | 2 |
| K400E | K230E | 301 | 27 | 9% | 15.6 | 2 |
| K293E | K126E | 187 | 25 | 13% | 9.7 | 2 |
| K293A | K126A | 82 | 1 | 1% | 4.2 | 2 |
| R333A | R165A | 235 | 54 | 23% | 12.1 | 2 |
| R333E | R165E | 999 | 0 | 0% | 51.7 | 2 |
| R338A | R170A | 33 | 3 | 10% | 1.7 | 2 |
| R338E | R170E | 222 | 124 | 56% | 11.5 | 8 |
| R338A/R403A | R170A/R233A | 328 | 106 | 32% | 17.0 | 6 |
| R338E/R403E | R170E/R233E | 6000 | 1089 | 18% | 310.2 | 2 |
| K293A/R403A | K126A/R233A | 999 | 0 | 0% | 51.7 | 2 |
| K293E/R403E | K126E/R233E | 999 | 0 | 0% | 51.7 | 2 |
| K293A/R338A/R403A | K126A/R170A/R233A | 999 | 0 | 0% | 51.7 | 2 |
| K293E/R338E/R403E | K126E/R170E/R233E | 999 | 0 | 0% | 51.7 | 2 |
| R318A/R403A | R150A/R233A | 999 | 0 | 0% | 51.7 | 2 |
| R318E/R403E | R150E/R233E | 999 | 0 | 0% | 51.7 | 2 |
| R318Y/E410N | R150Y/E240N | 607 | 164 | 27% | 31.4 | 4 |
| R338E/E410N | R170E/E240N | 92 | 14 | 15% | 4.7 | 4 |
| R338E/R403E/E410N | R170E/R233E/E240N | 2351 | 168 | 7% | 121.5 | 2 |
| R318Y/R338E/R403E | R150Y/R170E/R233E | 10000 | 0 | 0% | 517.0 | 7 |
| D203N/F205T/K228N | D39N/F41T/K63N | 822 | 69 | 8% | 42.5 | 2 |
| D203N/F205T/E410N | D39N/F41T/E240N | 377 | 20 | 5% | 19.5 | 2 |
| D203N/F205T/R338E | D39N/F41T/R170E | 1170 | 180 | 15% | 60.5 | 2 |
| D203N/F205T/R338A | D39N/F41T/R170A | 423 | 61 | 14% | 21.9 | 2 |
| D203N/F205T/R318Y | D39N/F41T/R150Y | 7226 | 133 | 2% | 373.6 | 2 |
| D203N/F205T/R338E/R403E | D39N/F41T/R170E/R233E | 1520 | 162 | 11% | 78.6 | 2 |
| K228N/E410N | K63N/E240N | 36 | 7 | 20% | 1.9 | 2 |
| K228N/R338E | K63N/R170E | 108 | 8 | 7% | 5.6 | 2 |
| K228N/R338A | K63N/R170A | 51 | 7 | 14% | 2.7 | 2 |
| K228N/R318Y | K63N/R150Y | 3414 | 73 | 2% | 176.5 | 2 |
| K228N/R338E/R403E | K63N/R170E/R233E | 1679 | 239 | 14% | 86.8 | 2 |
| R403E/E410N | R233E/E240N | 279 | 26 | 9% | 14.4 | 2 |
| R318Y/R338E/E410N | R150Y/R170E/E240N | 3458 | 1033 | 30% | 178.8 | 5 |
| D104N/K106S/R318Y/R338E/ | D[104]N/K[106]S/R150Y/R170E/ | 6328 | 4241 | 67% | 327.2 | 4 |
| E410N | E240N | | | | | |
| Y155F/R318Y/R338E/E410N | Y[155]F/R150Y/R170E/E240N | 1098 | 1095 | 100% | 56.8 | 7 |
| K228N/R318Y/E410N | K63N/R150Y/E240N | 475 | 83 | 17% | 24.6 | 2 |
| R318Y/R403E/E410N | R150Y/R233E/E240N | 7072 | 1387 | 20% | 365.6 | 2 |
| R318Y/R338E/R403E/E410N | R150Y/R170E/R233E/E240N | 5881 | 4757 | 81% | 304.1 | 4 |
| A103N/N105S/R318Y/R338E/ | A[103]N/N[105]S/R150Y/R170E/ | 9193 | 1037 | 11% | 475.3 | 4 |
| R403E/E410N | R233E/E240N | | | | | |
| D104N/K106S/R318Y/R338E/ | D[104]N/K[106]S/R150Y/R170E/ | 10000 | 0 | 0% | 517.0 | 2 |
| R403E/E410N | R233E/E240N | | | | | |
| Y155F/R318Y/R338E/R403E/ | Y[155]F/R150Y/R170E/R233E/ | 10000 | 0 | 0% | 517.0 | 2 |
| E410N | E240N | | | | | |
| A103N/N105S/Y155F/R318Y/ | A[103]N/N[105]S/Y[155]F/R150Y/ | 10000 | 0 | 0% | 517.0 | 2 |
| R338E/R403E/E410N | R170E/R233E/E240N | | | | | |
| D104N/K106S/Y155F/R318Y/ | D[104]N/K[106]S/Y[155]F/R150Y/ | 10000 | 0 | 0% | 517.0 | 2 |
| R338E/R403E/E410N | R170E/R233E/E240N | | | | | |
| D203N/F205T/R318Y/E410N | D39N/F41T/R150Y/E240N | 1280 | 220 | 17% | 66.2 | 2 |
| R333S | R165S | 720 | 67 | 9% | 37.2 | 2 |
| R338L | R170L | 121 | 6 | 5% | 6.3 | 2 |
| K316N | K148N | 56 | 2 | 4% | 2.9 | 2 |
| K316A | K148A | 63 | 15 | 24% | 3.2 | 2 |
| K316E | K148E | 183 | 2 | 1% | 9.5 | 2 |
| K316S | K148S | 77 | 15 | 19% | 4.0 | 2 |
| K316M | K148M | 9 | 2 | 24% | 0.5 | 2 |
| E239S | E74S | 101 | 12 | 12% | 5.2 | 2 |
| E239A | E74A | 30 | 14 | 47% | 1.6 | 3 |
| E239R | E74R | 65 | 17 | 26% | 3.3 | 2 |
| E239K | E74K | 19 | 4 | 22% | 1.0 | 2 |
| H257F | H92F | 12 | 1 | 11% | 0.6 | 2 |
| H257Y | H92Y | 20 | 2 | 12% | 1.0 | 2 |
| H257E | H92E | 25 | 12 | 48% | 1.3 | 3 |
| H257S | H92S | 23 | 21 | 89% | 1.2 | 3 |
| T412A | T242A | 25 | 3 | 14% | 1.3 | 4 |
| T412V | T242V | 23 | 4 | 16% | 1.2 | 4 |
| E410N/T412A | E240N/T242A | 10 | 1 | 7% | 0.5 | 2 |
| E410N/T412V | E240N/T242V | 11 | 3 | 24% | 0.6 | 2 |
| E410Q | E240Q | 24 | 14 | 60% | 1.2 | 4 |
| E410S | E240S | 26 | 16 | 63% | 1.3 | 7 |
| E410A | E240A | 42 | 24 | 58% | 2.2 | 6 |
| E410D | E240D | 41 | 2 | 5% | 2.1 | 2 |
| N346D | N178D | 222 | 176 | 79% | 11.5 | 5 |
| Y155F/N346D | Y[155]F/N178D | 223 | 102 | 46% | 11.5 | 2 |
| N346Y | N178Y | 36 | 2 | 7% | 1.9 | 4 |
| Y345A | Y177A | 96 | 87 | 90% | 5.0 | 13 |
| Y345T | Y177T | 16 | 0 | 0% | 0.8 | 2 |
| T343R | T175R | 7 | 1 | 10% | 0.4 | 2 |
| T343E | T175E | 55 | 8 | 15% | 2.8 | 2 |
| T343Q | T175Q | 13 | 3 | 25% | 0.7 | 2 |
| F342I | F174I | 98 | 10 | 11% | 5.1 | 2 |
| T343R/Y345T | T175R/Y177T | 6 | 0 | 4% | 0.3 | 2 |
| R318Y/R338E | R150Y/R170E | 397 | 50 | 12% | 20.5 | 2 |
| Y259F/K265T/Y345T | Y94F/K98T/Y177T | 6 | 0 | 2% | 0.3 | 2 |
| K228N/I251S | K63N/I86S | 73 | 16 | 22% | 3.8 | 2 |
| K228N/R318Y/R338E/R403E/ | K63N/R150Y/R170E/R233E/E240N | 10000 | 0 | 0% | 517.0 | 2 |
| E410N | | | | | | |
| Y155F/K228N/R318Y/R338E/ | Y[155]F/K63N/R150Y/R170E/ | 10000 | 0 | 0% | 517.0 | 2 |
| R403E/E410N | R233E/E240N | | | | | |
| D85N/K228N/R318Y/R338E/ | D[85]N/K63N/R150Y/R170E/ | 10000 | 0 | 0% | 517.0 | 2 |
| R403E/E410N | R233E/E240N | | | | | |
| I251S/R318Y/R338E/R403E/ | I86S/R150Y/R170E/R233E/E240N | 10000 | 0 | 0% | 517.0 | 2 |
| E410N | | | | | | |
| D104N/K106S/I251S/R318Y/ | D[104]N/K[106]S/I86S/R150Y/ | 10000 | 0 | 0% | 517.0 | 3 |
| R338E/R403E/E410N | R170E/R233E/E240N | | | | | |
| Y155F/I251S/R318Y/R338E/ | Y[155]F/I86S/R150Y/R170E/R233E/ | 10000 | 0 | 0% | 517.0 | 2 |
| R403E/E410N | E240N | | | | | |
| I251S/R318Y/R338E/E410N | I86S/R150Y/R170E/E240N | 5855 | 3889 | 66% | 302.7 | 7 |
| D104N/K106S/I251S/R318Y/ | D[104]N/K[106]S/I86S/R150Y/ | 8985 | 1436 | 16% | 464.5 | 2 |
| R338E/E410N | R170E/E240N | | | | | |
| F314N/K316S | F145N/K148S | 1221 | 505 | 41% | 63.1 | 4 |
| K247N/N249S/R318Y/R338E/ | K82N/N84S/R150Y/R170E/R233E/ | 8076 | 2967 | 37% | 417.6 | 9 |
| R403E/E410N | E240N | | | | | |
| Y155F/K247N/N249S/R318Y/ | Y[155]F/K82N/N84S/R150Y/R170E/ | 10000 | 0 | 0% | 517.0 | 3 |
| R338E/R403E/E410N | R233E/E240N | | | | | |
| A103N/N105S/K247N/N249S/ | A[103]N/N[105]S/K82N/N84S/ | 2497 | 772 | 31% | 129.1 | 4 |
| R318Y/R338E/R403E/E410N | R150Y/R170E/R233E/E240N | | | | | |
| D104N/K106S/K247N/N249S/ | D[104]N/K[106]S/K82N/N84S/ | 10000 | 0 | 0% | 517.0 | 2 |
| R318Y/R338E/R403E/E410N | R150Y/R170E/R233E/E240N | | | | | |
| K247N/N249S/R318Y/R338E/ | K82N/N84S/R150Y/R170E/E240N | 1514 | 631 | 42% | 78.3 | 3 |
| E410N | | | | | | |
| Y155F/K247N/N249S/R318Y/ | Y[155]F/K82N/N84S/R150Y/R170E/ | 3875 | 846 | 22% | 200.4 | 2 |
| R338E/E410N | E240N | | | | | |
| R318Y/R338E/R403E/E410S | R150Y/R170E/R233E/E240S | 10000 | 0 | 0% | 517.0 | 2 |
| R318Y/R338E/E410S | R150Y/R170E/E240S | 5402 | 2785 | 52% | 279.3 | 5 |
| K228N/K247N/N249S | K63N/K82N/N84S | 85 | 19 | 22% | 4.4 | 2 |
| D104N/K106S/Y155F/K228N/ | D[104]N/K[106]S/Y[155]F/K63N/ | 32 | 12 | 37% | 1.6 | 4 |
| K247N/N249S | K82N/N84S | | | | | |
| D104N/K106S/K228N/K247N/ | D[104]N/K[106]S/K63N/K82N/ | 41 | 18 | 45% | 2.1 | 10 |
| N249S | N84S | | | | | |
| Y155F/K228N/K247N/N249S | Y[155]F/K63N/K82N/N84S | 27 | 6 | 22% | 1.4 | 2 |
| K228N/K247N/N249S/R318Y/ | K63N/K82N/N84S/R150Y/R170E/ | 10000 | 0 | 0% | 517.0 | 2 |
| R338E/R403E/E410N | R233E/E240N | | | | | |
| R318Y/R338E/R403E/E410N/ | R150Y/R170E/R233E/E240N/ | 10000 | 0 | 0% | 517.0 | 2 |
| T412V | T242V | | | | | |
| R318Y/R338E/R403E/E410N/ | R150Y/R170E/R233E/E240N/ | 10000 | 0 | 0% | 517.0 | 2 |
| T412A | T242A | | | | | |
| R318Y/R338E/R403E/T412A | R150Y/R170E/R233E/T242A | 10000 | 0 | 0% | 517.0 | 2 |
| R318Y/R338E/T412A | R150Y/R170E/T242A | 7661 | 3243 | 42% | 396.1 | 9 |
| R318Y/R338E/E410N/T412V | R150Y/R170E/E240N/T242V | 10000 | 0 | 0% | 517.0 | 2 |
| N260S/R318Y/R338E/R403E/ | N95S/R150Y/R170E/R233E/E240N | 10000 | 0 | 0% | 517.0 | 2 |
| E410N | | | | | | |
| D104N/K106S/N260S/R318Y/ | D[104]N/K[106]S/N95S/R150Y/ | 10000 | 0 | 0% | 517.0 | 3 |
| R338E/R403E/E410N | R170E/R233E/E240N | | | | | |
| Y155F/N260S/R318Y/R338E/ | Y[155]F/N95S/R150Y/R170E/ | 9696 | 527 | 5% | 501.3 | 3 |
| R403E/E410N | R233E/E240N | | | | | |
| R318Y/R338E/N346D/R403E/ | R150Y/R170E/N178D/R233E/ | 10000 | 0 | 0% | 517.0 | 2 |
| E410N | E240N | | | | | |
| Y155F/R318Y/R338E/N346D/ | Y[155]F/R150Y/R170E/N178D/ | 10000 | 0 | 0% | 517.0 | 2 |
| R403E/E410N | R233E/E240N | | | | | |
| K247N/N249S/N260S | K82N/N84S/N95S | 157 | 38 | 24% | 8.1 | 3 |
| Y155F/K247N/N249S/N260S | Y[155]F/K82N/N84S/N95S | 152 | 39 | 26% | 7.9 | 3 |
| D[104]N/K[106]S/K247N/N249S/ | D[104]N/K[106]S/K82N/N84S/ | 1262 | 40 | 3% | 65.3 | 2 |
| N260S | N95S | | | | | |
| D[104]N/K[106]S/Y[155]F/K247N/ | D[104]N/K[106]S/Y[155]F/K82N/ | 692 | 84 | 12% | 35.8 | 2 |
| N249S/N260S | N84S/N95S | | | | | |
| K247N/N249S/N260S/R318Y/ | K82N/N84S/N95S/R150Y/R170E/ | 5560 | 3872 | 70% | 287.5 | 3 |
| R338E/R403E/E410N | R233E/E240N | | | | | |
| Y155F/N260S/N346D | Y[155]F/N95S/N178D | 1382 | 477 | 35% | 71.4 | 2 |
| R318Y/R338E/T343R/R403E/ | R150Y/R170E/T175R/R233E/ | 10000 | 0 | 0% | 517.0 | 2 |
| E410N | E240N | | | | | |
| R338E/T343R | R170E/T175R | 16 | 6 | 38% | 0.8 | 2 |

* A K_{0.5} value of 999 nM indicates the lower limit value for those variants with less than 10% inhibition under the conditions of the standard assay (35 nM-0 nM AT-III).
* Variants with >50% of WT k_{cat}/K_{M} (see Example 4, Table 23) and initially given a K_{0.5} value of 999 nM were retested at higher AT-III concentrations, expanding in the sensitivity of the assay.
* A K_{0.5} value of 9999 nM indicates the lower limit value for those variants with less than 10% inhibition under the conditions of the expanded sensitivity assay (1000 nM-0 nM AT-III and 5000-0 nM AT-III).

TABLE 31
Inhibition of FIXa variants by AT-III/UFH

| Mutation | Mutation | K_{0.5} | ±S.D. | | K_{0.5-mut}/ | |
|---|---|---|---|---|---|---|
| (Mature FIX Numbering) | (Chymotrypsin Numbering) | (nM) | (nM) | % CV | K_{0.5-wt} | n |
| BeneFIX ® Coagulation | BeneFIX ® Coagulation | 17 | 8 | 47% | 0.9 | 55 |
| FIX (T148A) | FIX (T[148]A) | | | | | |
| Plasma Purified FIXa | Plasma Purified FIXa | 30 | 4 | 14% | 1.6 | 5 |
| Catalyst Biosciences WT | Catalyst Biosciences WT | 19 | 7 | 34% | 1.0 | 15 |
| N157D | N[157]D | 17 | 4 | 23% | 0.9 | 2 |
| Y155F | Y[155]F | 13 | 0 | 1% | 0.7 | 2 |
| A103N/N105S/Y155F | A[103]N/N[105]S/Y[155]F | 11 | 6 | 49% | 0.6 | 2 |
| D104N/K106S/Y155F | D[104]N/K[106]S/Y[155]F | 6 | 2 | 33% | 0.3 | 2 |
| A103N/N105S | A[103]N/N[105]S | 20 | 3 | 14% | 1.0 | 2 |
| D104N/K106S | D[104]N/K[106]S | 20 | 2 | 9% | 1.0 | 2 |
| K106N/V108S | K[106]N/V[108]S | 24 | 0 | 1% | 1.2 | 2 |
| D85N | D[85]N | 17 | 3 | 15% | 0.9 | 4 |
| T148A | T[148]A | 17 | 10 | 56% | 0.9 | 13 |
| K5A | K[5]A | 22 | 3 | 15% | 1.2 | 2 |
| D64N | D[64]N | 18 | 0 | 1% | 0.9 | 2 |
| D64A | D[64]A | 16 | 2 | 12% | 0.8 | 2 |
| N167D | N[167]D | 12 | 2 | 14% | 0.6 | 2 |
| N167Q | N[167]Q | 12 | 1 | 8% | 0.6 | 2 |
| S61A | S[61]A | 19 | 3 | 18% | 1.0 | 2 |
| S53A | S[53]A | 27 | 4 | 16% | 1.4 | 2 |
| T159A | T[159]A | 33 | 7 | 23% | 1.7 | 2 |
| T169A | T[169]A | 17 | 6 | 36% | 0.9 | 2 |
| T172A | T[172]A | 16 | 3 | 21% | 0.8 | 2 |
| T179A | T[179]A | 24 | 2 | 7% | 1.2 | 2 |
| Y155H | Y[155]H | 25 | 4 | 15% | 1.3 | 2 |
| Y155Q | Y[155]Q | 23 | 0 | 1% | 1.2 | 2 |
| S158A | S[158]A | 20 | 1 | 5% | 1.0 | 2 |
| S158D | S[158]D | 15 | 2 | 16% | 0.8 | 2 |
| S158E | S[158]E | 14 | 1 | 10% | 0.7 | 2 |
| N157Q | N[157]Q | 16 | 2 | 11% | 0.8 | 2 |
| D203N/F205T | D39N/F41T | 271 | 51 | 19% | 14.0 | 5 |
| D85N/D203N/F205T | D[85]N/D39N/F41T | 587 | 65 | 11% | 30.3 | 2 |
| K228N | K63N | 29 | 13 | 46% | 1.5 | 6 |
| D85N/K228N | D[85]N/K63N | 34 | 3 | 7% | 1.7 | 2 |
| A103N/N105S/K228N | A[103]N/N[105]S/K63N | 46 | 17 | 36% | 2.4 | 2 |
| D104N/K106S/K228N | D[104]N/K[106]S/K63N | 41 | 21 | 52% | 2.1 | 2 |
| Y155F/K228N | Y[155]F/K63N | 15 | n.d. | n.d. | 0.8 | 1 |
| D104N/K106S/Y155F/K228N | D[104]N/K[106]S/Y[155]F/K63N | 49 | 5 | 9% | 2.5 | 2 |
| I251S | I86S | 28 | 8 | 28% | 1.4 | 4 |
| D85N/I251S | D[85]N/I86S | 19 | 6 | 30% | 1.0 | 2 |
| D85N/D104N/K106S/I251S | D[85]N/D[104]N/K[106]S/I86S | 28 | 11 | 41% | 1.4 | 2 |
| A103N/N105S/I251S | A[103]N/N[105]S/I86S | 42 | 14 | 33% | 2.2 | 3 |
| D104N/K106S/I251S | D[104]N/K[106]S/I86S | 32 | 5 | 16% | 1.6 | 2 |
| Y155F/I251S | Y[155]F/I86S | 18 | 3 | 19% | 0.9 | 2 |
| A262S | A95bS | 25 | 5 | 21% | 1.3 | 2 |
| K413N | K243N | 27 | 13 | 48% | 1.4 | 2 |
| E410N | E240N | 8 | 2 | 25% | 0.4 | 6 |
| E239N | E74N | 132 | 21 | 16% | 6.8 | 2 |
| T241N/H243S | T76N/H78S | 21 | 12 | 56% | 1.1 | 2 |
| K247N/N249S | K82N/N84S | 22 | 4 | 18% | 1.1 | 4 |
| Y155F/K247N/N249S | Y[155]F/K82N/N84S | 13 | 3 | 24% | 0.7 | 4 |
| A103N/N105S/K247N/N249S | A[103]N/N[105]S/K82N/N84S | 53 | 29 | 55% | 2.7 | 4 |
| D104N/K106S/K247N/N249S | D[104]N/K[106]S/K82N/N84S | 19 | 2 | 9% | 1.0 | 2 |
| D104N/K106S/Y155F/K247N/N249S | D[104]N/K[106]S/Y[155]F/K82N/ | 27 | 2 | 9% | 1.4 | 2 |
| | N84S | | | | | |
| L321N | L153N | 25 | 6 | 25% | 1.3 | 2 |
| F314N/H315S | F145N/H147S | 104 | 27 | 26% | 5.4 | 4 |
| S319N/L321S | S151N/L153S | 65 | 11 | 17% | 3.4 | 2 |
| N260S | N95S | 312 | 283 | 91% | 16.1 | 13 |
| D104N/K106S/N260S | D[104]N/K[106]S/N95S | 228 | 82 | 36% | 11.8 | 2 |
| Y155F/N260S | Y[155]F/N95S | 77 | 16 | 21% | 4.0 | 2 |
| D104N/K106S/Y155F/N260S | D[104]N/K[106]S/Y[155]F/N95S | 292 | 37 | 13% | 15.1 | 2 |
| Y284N | Y117N | 41 | 25 | 63% | 2.1 | 5 |
| R318N/A320S | R150N/A152S | 999 | 0 | 0% | 51.7 | 2 |
| R318A | R150A | 4145 | 1297 | 31% | 214.3 | 2 |
| R318E | R150E | 9999 | 0 | 0% | 517.0 | 2 |
| R318Y | R150Y | 1976 | 430 | 22% | 102.2 | 2 |
| R312Q | R143Q | 33 | 9 | 26% | 1.7 | 2 |
| R312A | R143A | 31 | 0 | 1% | 1.6 | 2 |
| R312Y | R143Y | 2499 | 350 | 14% | 129.2 | 2 |
| R312L | R143L | 17 | 1 | 5% | 0.9 | 2 |
| V202M | V38M | 14 | 2 | 14% | 0.7 | 2 |
| V202Y | V38Y | 18 | 3 | 14% | 0.9 | 2 |
| D203M | D39M | 11 | 0 | 1% | 0.6 | 2 |
| D203Y | D39Y | 16 | 3 | 21% | 0.8 | 2 |
| A204M | A40M | 29 | 3 | 9% | 1.5 | 2 |
| A204Y | A40Y | 24 | 1 | 3% | 1.2 | 2 |
| K400A/R403A | K230A/R233A | 999 | 0 | 0% | 51.7 | 2 |
| K400E/R403E | K230E/R233E | 999 | 0 | 0% | 51.7 | 2 |
| R403A | R233A | 190 | 34 | 18% | 9.8 | 4 |
| R403E | R233E | 731 | 14 | 2% | 37.8 | 2 |
| K400A | K230A | 114 | 3 | 3% | 5.9 | 2 |
| K400E | K230E | 301 | 27 | 9% | 15.6 | 2 |
| K293E | K126E | 187 | 25 | 13% | 9.7 | 2 |
| K293A | K126A | 82 | 1 | 1% | 4.2 | 2 |
| R333A | R165A | 235 | 54 | 23% | 12.1 | 2 |
| R333E | R165E | 999 | 0 | 0% | 51.7 | 2 |
| R338A | R170A | 33 | 3 | 10% | 1.7 | 2 |
| R338E | R170E | 222 | 124 | 56% | 11.5 | 8 |
| R338A/R403A | R170A/R233A | 328 | 106 | 32% | 17.0 | 6 |
| R338E/R403E | R170E/R233E | 6000 | 1089 | 18% | 310.2 | 2 |
| K293A/R403A | K126A/R233A | 999 | 0 | 0% | 51.7 | 2 |
| K293E/R403E | K126E/R233E | 999 | 0 | 0% | 51.7 | 2 |
| K293A/R338A/R403A | K126A/R170A/R233A | 999 | 0 | 0% | 51.7 | 2 |
| K293E/R338E/R403E | K126E/R170E/R233E | 999 | 0 | 0% | 51.7 | 2 |
| R318A/R403A | R150A/R233A | 999 | 0 | 0% | 51.7 | 2 |
| R318E/R403E | R150E/R233E | 999 | 0 | 0% | 51.7 | 2 |
| R318Y/E410N | R150Y/E240N | 607 | 164 | 27% | 31.4 | 4 |
| R338E/E410N | R170E/E240N | 92 | 14 | 15% | 4.7 | 4 |
| R338E/R403E/E410N | R170E/R233E/E240N | 2351 | 168 | 7% | 121.5 | 2 |
| R318Y/R338E/R403E | R150Y/R170E/R233E | 10000 | 0 | 0% | 517.0 | 7 |
| D203N/F205T/K228N | D39N/F41T/K63N | 822 | 69 | 8% | 42.5 | 2 |
| D203N/F205T/E410N | D39N/F41T/E240N | 377 | 20 | 5% | 19.5 | 2 |
| D203N/F205T/R338E | D39N/F41T/R170E | 1170 | 180 | 15% | 60.5 | 2 |
| D203N/F205T/R338A | D39N/F41T/R170A | 423 | 61 | 14% | 21.9 | 2 |
| D203N/F205T/R318Y | D39N/F41T/R150Y | 7226 | 133 | 2% | 373.6 | 2 |
| D203N/F205T/R338E/R403E | D39N/F41T/R170E/R233E | 1520 | 162 | 11% | 78.6 | 2 |
| K228N/E410N | K63N/E240N | 36 | 7 | 20% | 1.9 | 2 |
| K228N/R338E | K63N/R170E | 108 | 8 | 7% | 5.6 | 2 |
| K228N/R338A | K63N/R170A | 51 | 7 | 14% | 2.7 | 2 |
| K228N/R318Y | K63N/R150Y | 3414 | 73 | 2% | 176.5 | 2 |
| K228N/R338E/R403E | K63N/R170E/R233E | 1679 | 239 | 14% | 86.8 | 2 |
| R403E/E410N | R233E/E240N | 279 | 26 | 9% | 14.4 | 2 |
| R318Y/R338E/E410N | R150Y/R170E/E240N | 3458 | 1033 | 30% | 178.8 | 5 |
| D104N/K106S/R318Y/R338E/E410N | D[104]N/K[106]S/R150Y/R170E/ | 6328 | 4241 | 67% | 327.2 | 4 |
| | E240N | | | | | |
| Y155F/R318Y/R338E/E410N | Y[155]F/R150Y/R170E/E240N | 1098 | 1095 | 100% | 56.8 | 7 |
| K228N/R318Y/E410N | K63N/R150Y/E240N | 475 | 83 | 17% | 24.6 | 2 |
| R318Y/R403E/E410N | R150Y/R233E/E240N | 7072 | 1387 | 20% | 365.6 | 2 |
| R318Y/R338E/R403E/E410N | R150Y/R170E/R233E/E240N | 5881 | 4757 | 81% | 304.1 | 4 |
| A103N/N105S/R318Y/R338E/R403E/ | A[103]N/N[105]S/R150Y/R170E/ | 9193 | 1037 | 11% | 475.3 | 4 |
| E410N | R233E/E240N | | | | | |
| D104N/K106S/R318Y/R338E/R403E/ | D[104]N/K[106]S/R150Y/R170E/ | 10000 | 0 | 0% | 517.0 | 2 |
| E410N | R233E/E240N | | | | | |
| Y155F/R318Y/R338E/R403E/E410N | Y[155]F/R150Y/R170E/R233E/ | 10000 | 0 | 0% | 517.0 | 2 |
| | E240N | | | | | |
| A103N/N105S/Y155F/R318Y/R338E/ | A[103]N/N[105]S/Y[155]F/R150Y/ | 10000 | 0 | 0% | 517.0 | 2 |
| R403E/E410N | R170E/R233E/E240N | | | | | |
| D104N/K106S/Y155F/R318Y/R338E/ | D[104]N/K[106]S/Y[155]F/R150Y/ | 10000 | 0 | 0% | 517.0 | 2 |
| R403E/E410N | R170E/R233E/E240N | | | | | |
| D203N/F205T/R318Y/E410N | D39N/F41T/R150Y/E240N | 1280 | 220 | 17% | 66.2 | 2 |
| R333S | R165S | 720 | 67 | 9% | 37.2 | 2 |
| R338L | R170L | 121 | 6 | 5% | 6.3 | 2 |
| K316N | K148N | 56 | 2 | 4% | 2.9 | 2 |
| K316A | K148A | 63 | 15 | 24% | 3.2 | 2 |
| K316E | K148E | 183 | 2 | 1% | 9.5 | 2 |
| K316S | K148S | 77 | 15 | 19% | 4.0 | 2 |
| K316M | K148M | 9 | 2 | 24% | 0.5 | 2 |
| E239S | E74S | 101 | 12 | 12% | 5.2 | 2 |
| E239A | E74A | 30 | 14 | 47% | 1.6 | 3 |
| E239R | E74R | 65 | 17 | 26% | 3.3 | 2 |
| E239K | E74K | 19 | 4 | 22% | 1.0 | 2 |
| H257F | H92F | 12 | 1 | 11% | 0.6 | 2 |
| H257Y | H92Y | 20 | 2 | 12% | 1.0 | 2 |
| H257E | H92E | 25 | 12 | 48% | 1.3 | 3 |
| H257S | H92S | 23 | 21 | 89% | 1.2 | 3 |
| T412A | T242A | 25 | 3 | 14% | 1.3 | 4 |
| T412V | T242V | 23 | 4 | 16% | 1.2 | 4 |
| E410N/T412A | E240N/T242A | 10 | 1 | 7% | 0.5 | 2 |
| E410N/T412V | E240N/T242V | 11 | 3 | 24% | 0.6 | 2 |
| E410Q | E240Q | 24 | 14 | 60% | 1.2 | 4 |
| E410S | E240S | 26 | 16 | 63% | 1.3 | 7 |
| E410A | E240A | 42 | 24 | 58% | 2.2 | 6 |
| E410D | E240D | 41 | 2 | 5% | 2.1 | 2 |
| N346D | N178D | 222 | 176 | 79% | 11.5 | 5 |
| Y155F/N346D | Y[155]F/N178D | 223 | 102 | 46% | 11.5 | 2 |
| N346Y | N178Y | 36 | 2 | 7% | 1.9 | 4 |
| Y345A | Y177A | 96 | 87 | 90% | 5.0 | 13 |
| Y345T | Y177T | 16 | 0 | 0% | 0.8 | 2 |
| T343R | T175R | 7 | 1 | 10% | 0.4 | 2 |
| T343E | T175E | 55 | 8 | 15% | 2.8 | 2 |
| T343Q | T175Q | 13 | 3 | 25% | 0.7 | 2 |
| F342I | F174I | 98 | 10 | 11% | 5.1 | 2 |
| T343R/Y345T | T175R/Y177T | 6 | 0 | 4% | 0.3 | 2 |
| R318Y/R338E | R150Y/R170E | 397 | 50 | 12% | 20.5 | 2 |
| Y259F/K265T/Y345T | Y94F/K98T/Y177T | 6 | 0 | 2% | 0.3 | 2 |
| K228N/I251S | K63N/I86S | 73 | 16 | 22% | 3.8 | 2 |
| K228N/R318Y/R338E/R403E/E410N | K63N/R150Y/R170E/R233E/ | 10000 | 0 | 0% | 517.0 | 2 |
| | E240N | | | | | |
| Y155F/K228N/R318Y/R338E/R403E/ | Y[155]F/K63N/R150Y/R170E/ | 10000 | 0 | 0% | 517.0 | 2 |
| E410N | R233E/E240N | | | | | |
| D85N/K228N/R318Y/R338E/R403E/ | D[85]N/K63N/R150Y/R170E/ | 10000 | 0 | 0% | 517.0 | 2 |
| E410N | R233E/E240N | | | | | |
| I251S/R318Y/R338E/R403E/E410N | I86S/R150Y/R170E/R233E/E240N | 10000 | 0 | 0% | 517.0 | 2 |
| D104N/K106S/I251S/R318Y/R338E/ | D[104]N/K[106]S/I86S/R150Y/ | 10000 | 0 | 0% | 517.0 | 3 |
| R403E/E410N | R170E/R233E/E240N | | | | | |
| Y155F/I251S/R318Y/R338E/R403E/ | D[104]N/K[106]S/I86S/R150Y/ | 10000 | 0 | 0% | 517.0 | 2 |
| E410N | R170E/R233E/E240N | | | | | |
| I251S/R318Y/R338E/E410N | I86S/R150Y/R170E/E240N | 5855 | 3889 | 66% | 302.7 | 7 |
| D104N/K106S/I251S/R318Y/R338E/ | D[104]N/K[106]S/I86S/R150Y/ | 8985 | 1436 | 16% | 464.5 | 2 |
| E410N | R170E/E240N | | | | | |
| F314N/K316S | F145N/K148S | 1221 | 505 | 41% | 63.1 | 4 |
| K247N/N249S/R318Y/R338E/R403E/ | K82N/N84S/R150Y/R170E/R233E/ | 8076 | 2967 | 37% | 417.6 | 9 |
| E410N | E240N | | | | | |
| Y155F/K247N/N249S/R318Y/R338E/ | Y[155]F/K82N/N84S/R150Y/ | 10000 | 0 | 0% | 517.0 | 3 |
| R403E/E410N | R170E/R233E/E240N | | | | | |
| A103N/N105S/K247N/N249S/R318Y/ | A[103]N/N[105]S/K82N/N84S/ | 2497 | 772 | 31% | 129.1 | 4 |
| R338E/R403E/E410N | R150Y/R170E/R233E/E240N | | | | | |
| D104N/K106S/K247N/N249S/R318Y/ | D[104]N/K[106]S/K82N/N84S/ | 10000 | 0 | 0% | 517.0 | 2 |
| R338E/R403E/E410N | R150Y/R170E/R233E/E240N | | | | | |
| K247N/N249S/R318Y/R338E/E410N | K82N/N84S/R150Y/R170E/E240N | 1514 | 631 | 42% | 78.3 | 3 |
| Y155F/K247N/N249S/R318Y/R338E/ | Y[155]F/K82N/N84S/R150Y/ | 3875 | 846 | 22% | 200.4 | 2 |
| E410N | R170E/E240N | | | | | |
| R318Y/R338E/R403E/E410S | R150Y/R170E/R233E/E240S | 10000 | 0 | 0% | 517.0 | 2 |
| R318Y/R338E/E410S | R150Y/R170E/E240S | 5402 | 2785 | 52% | 279.3 | 5 |
| K228N/K247N/N249S | K63N/K82N/N84S | 85 | 19 | 22% | 4.4 | 2 |
| D104N/K106S/Y155F/K228N/K247N/ | D[104]N/K[106]S/Y[155]F/K63N/ | 32 | 12 | 37% | 1.6 | 4 |
| N249S | K82N/N84S | | | | | |
| D104N/K106S/K228N/K247N/ | D[104]N/K[106]S/K63N/K82N/ | 41 | 18 | 45% | 2.1 | 10 |
| N249S | N84S | | | | | |
| Y155F/K228N/K247N/N249S | Y[155]F/K63N/K82N/N84S | 27 | 6 | 22% | 1.4 | 2 |
| K228N/K247N/N249S/R318Y/R338E/ | K63N/K82N/N84S/R150Y/R170E/ | 10000 | 0 | 0% | 517.0 | 2 |
| R403E/E410N | R233E/E240N | | | | | |
| R318Y/R338E/R403E/E410N/T412V | R150Y/R170E/R233E/E240N/ | 10000 | 0 | 0% | 517.0 | 2 |
| | T242V | | | | | |
| R318Y/R338E/R403E/E410N/T412A | R150Y/R170E/R233E/E240N/ | 10000 | 0 | 0% | 517.0 | 2 |
| | T242A | | | | | |
| R318Y/R338E/R403E/T412A | R150Y/R170E/R233E/T242A | 10000 | 0 | 0% | 517.0 | 2 |
| R318Y/R338E/T412A | R150Y/R170E/T242A | 7661 | 3243 | 42% | 396.1 | 9 |
| R318Y/R338E/E410N/T412V | R150Y/R170E/E240N/T242V | 4871 | 4173 | 86% | 251.8 | 9 |
| N260S/R318Y/R338E/R403E/E410N | N95S/R150Y/R170E/R233E/ | 10000 | 0 | 0% | 517.0 | 2 |
| | E240N | | | | | |
| D104N/K106S/N260S/R318Y/R338E/ | D[104]N/K[106]S/N95S/R150Y/ | 10000 | 0 | 0% | 517.0 | 3 |
| R403E/E410N | R170E/R233E/E240N | | | | | |
| Y155F/N260S/R318Y/R338E/R403E/ | Y[155]F/N95S/R150Y/R170E/ | 9696 | 527 | 5% | 501.3 | 3 |
| E410N | R233E/E240N | | | | | |
| R318Y/R338E/N346D/R403E/E410N | R150Y/R170E/N178D/R233E/ | 10000 | 0 | 0% | 517.0 | 2 |
| | E240N | | | | | |
| Y155F/R318Y/R338E/N346D/R403E/ | Y[155]F/R150Y/R170E/N178D/ | 10000 | 0 | 0% | 517.0 | 2 |
| E410N | R233E/E240N | | | | | |
| K247N/N249S/N260S | K82N/N84S/N95S | 157 | 38 | 24% | 8.1 | 3 |
| Y155F/K247N/N249S/N260S | Y[155]F/K82N/N84S/N95S | 152 | 39 | 26% | 7.9 | 3 |
| D104N/K106S/K247N/N249S/N260S | D[104]N/K[106]S/K82N/N84S/ | 1262 | 40 | 3% | 65.3 | 2 |
| | N95S | | | | | |
| D104N/K106S/Y155F/K247N/N249S/ | D[104]N/K[106]S/Y[155]F/K82N/ | 692 | 84 | 12% | 35.8 | 2 |
| N260S | N84S/N95S | | | | | |
| K247N/N249S/N260S/R318Y/R338E/ | K82N/N84S/N95S/R150Y/R170E/ | 5560 | 3872 | 70% | 287.5 | 3 |
| R403E/E410N | R233E/E240N | | | | | |
| Y155F/N260S/N346D | Y[155]F/N95S/N178D | 1382 | 477 | 35% | 71.4 | 2 |
| R318Y/R338E/T343R/R403E/E410N | R150Y/R170E/T175R/R233E/ | 10000 | 0 | 0% | 517.0 | 4 |
| | E240N | | | | | |
| R338E/T343R | R170E/T175R | 12 | 6 | 46% | 0.6 | 4 |
| T343R/N346Y | T175R/N178Y | 3 | 1 | 32% | 0.1 | 4 |
| R318Y/R338E/N346Y/R403E/E410N | R150Y/R170E/N178Y/R233E/ | 10000 | 0 | 0% | 517.0 | 2 |
| | E240N | | | | | |
| R318Y/R338E/T343R/N346Y/R403E/ | R150Y/R170E/T175R/N178Y/ | 10000 | 0 | 0% | 517.0 | 2 |
| E410N | R233E/E240N | | | | | |
| T343R/N346D | T175R/N178D | 22 | 4 | 18% | 1.1 | 2 |
| R318Y/R338E/T343R/N346D/R403E/ | R150Y/R170E/T175R/N178D/ | 10000 | 0 | 0% | 517.0 | 2 |
| E410N | R233E/E240N | | | | | |
| R318Y/R338E/Y345A/R403E/E410N | R150Y/R170E/Y177A/R233E/ | 10000 | 0 | 0% | 517.0 | 2 |
| | E240N | | | | | |
| R318Y/R338E/Y345A/N346D/R403E/ | R150Y/R170E/Y177A/N178D/ | 10000 | 0 | 0% | 517.0 | 2 |
| E410N | R233E/E240N | | | | | |

* A K_{0.5} value of 999 nM indicates the lower limit value for those variants with less than 10% inhibition under the conditions of the standard assay (35 nM-0 nM AT-III).
* Variants with >50% of WT k_{cat}/K_{M} (see Example 4) and initially given a K_{0.5} value of 999 nM were retested at higher AT-III concentrations, expanding in the sensitivity of the assay.
* A K_{0.5} value of 10000 nM indicates the lower limit value for those variants with less than 10% inhibition under the conditions of the expanded sensitivity assay (1000 nM-0 nM AT-III and 5000-0 nM AT-III).

C. Determination of the Second-Order Rate Constant (kₐₚₚ) for Inhibition of FIXa by the Antithrombin/UFH Complex

[0596] Additional experiments were performed to measure the second-order rate constant for inhibition (kₐₚₚ) of FIXa variants by AT-III/UFH using the same assay as described above in Example 5B with minor modifications. This method is more amenable to evaluating the second-order rate constants for multiple variants concurrently than the traditional competitive kinetic or discontinuous methods (see e.g., Olson et al. (2004) J. Thromb. Haemost. 92(5):929-939).

[0597] For inhibition reactions in the presence of UFH, a 1000 nM solution of AT-III/UFH were prepared by dilution of a 20 μM stock of plasma purified human AT-III (Molecular Innovations) into a solution of excess UFH (2 μM) in a 1.0 mL volume of 1× Buffer A (50 mM Tris, 100 mM NaCl, 10 mM CaCl₂), 0.01% Tween-20, pH 7.4). AT-III/UFH solutions were incubated for 30 minutes at room temperature prior to being serially diluted 2.0-fold in a 96 deep-well polypropylene plate with a final volume of 500 μL 1× Buffer A containing 2 μM UFH. The final dilutions of AT-III for the modified kₐₚₚ assay ranged from 500 nM-0 nM (i.e., rows A-H). A total of 35 of each AT-III dilution was aliquoted into their respective rows of a 96-well V-bottom storage plate to fill all columns (i.e., 1-12). FIXa variants were initially diluted to 100 nM in 1× Buffer A. Subsequently, 50 μL of each 100 nM FIXa variant was diluted to a concentration of 2.0 nM in 2.5 mL of 1× Buffer A and then 70 μL of this solution was aliquoted into a 96-well V-bottom storage plate according to the same predefined plate map as above (4 FIXa variants per plate).

[0598] Assay reactions were initiated using a BioMek FX liquid handling system programmed to dispense 35 μL of the FIXa solutions into the plates containing 35 of each dilution of AT-III/UFH per well for a total of two duplicate assay plates for each FIXa variant. The final inhibition assay conditions were: 1.0 nM FIXa and AT-III dilutions ranging from 500 nM to 0 nM in 1 μM UFH so that the heparin remained in excess. Inhibition reactions were further incubated for various times at room temperature (˜25° C.) depending on the expected inhibition rate constant and adjusted so that >90% inhibition could be reached at the highest concentration of AT-III in the assay (500 nM). Typical incubation times were determined specifically for each variant, or class of variants, but generally followed the incubation times outlined in Table 32, below.

TABLE 32
Assay Incubation Times Based on Expected kₐₚₚ Values

| Expected kₐₚₚ | FIXa/ATIII |
|---|---|
| (M⁻¹s⁻¹) | Incubation (sec) |
| 1.0E−07 | 10 |
| 1.0E−06 | 30 |
| 1.0E−05 | 120 |
| 1.0E−04 | 600 |
| 1.0E−03 | 3600 |
| 1.0E−02 | 7200 |

[0599] Following the desired incubation time a 40 μL aliquot of the reaction was transferred by the BioMek FX to a 96-well black half-area plate containing 20 μL of 2.5 mM Mesyl-D-CHG-Gly-Arg-AMC per well in assay Buffer C (50 mM Tris, 100 mM NaCl, 10 mM CaCl₂), 0.01% Tween-20, pH 7.4, 82% ethylene glycol and 5 mg/mL polybrene). Polybrene (hexadimethrine bromide) at a final concentration of 5 mg/mL was added to Buffer C to quench the AT-III/UFH reaction. Residual activity of FIXa was assessed by following the initial rates of substrate cleavage for 60 minutes in a fluorescence reader set to 25° C. The final assay conditions for determination of residual activity were 0.67 nM FIXa variant, 0.83 mM Mesyl-D-CHG-Gly-Arg-AMC, 30% ethylene glycol and 5 mg/mL polybrene in 50 mM Tris, 100 mM NaCl, 10 mM CaCl₂), 0.01% Tween-20, pH 7.4. Data analyses to calculate the K_{0.5} value were performed in a similar manner as that described above for AT-III/UFH inhibition assays in Example 5B using the ActivityBase software package and the XE Runner data analysis module (IDBS Software). Using the assay set-up outlined in Example 5B under psuedo-1st-order conditions and testing various incubation times it is thus possible to calculate the apparent second-order rate constant for inhibition by AT-III (kₐₚₚ) using the following equations:

$$\begin{matrix}{k}_{app} = \frac{{k}_{obs}}{( \frac{[ \text{AT-III]}}{S . I .} )} & Equation ( 1 ) \\ {k}_{obs} = \frac{ln ( 2 )}{{t}_{1 / 2}} & Equation ( 2 )\end{matrix}$$

[0600] Given that the fit value for K_{0.5}=[AT-III] at t_{1/2} (defined by the time of the assay) all the necessary values are available to calculate k_{obs} and thus the kₐₚₚ for inhibition of a given FIXa variant by AT-III. The calculated kₐₚₚ value does not take into account any potential effects of changes in the stoichiometry of inhibition (S.I.), which is given a constant value of 1.2 in the present calculations as this value reflects what is typically reported in the literature (see e.g., Olson et al. (2004) J. Thromb. Haemost. 92(5):929-939).

[0601] Table 33 provides the results of the second-order rate assays that were performed using AT-III/UFH. The results are presented both as the fitted kₐₚₚ parameter and as a representation of the extent of AT-III resistance for each variant compared to the wild-type FIXa expressed as a ratio of their fitted kₐₚₚ values (kₐₚₚ wild-type/kₐₚₚ variant). Several FIXa variants exhibited greater than 10,000-20,000 fold increased resistance to AT-III compared to wild-type FIXa. For example, FIXa-R318A, FIXa-R318Y, FIXa-R338A/R403A, FIXa-R318Y/R338E/R403E, FIXa-R318Y/R338E/R403E, FIXa-K247N/N249S/R318Y/R338E/R403E, FIXa-R318Y/R338E/R403E, FIXa-K228N/I251S/R318Y/R338E/R403E/E410N, FIXa-R318Y/R338E/E410N and FIXa-R318Y/R338E/R403E/E410N are among this group, which exhibited significant resistance to AT-III.

TABLE 33
Second-Order Rate Constant for Inhibition by AT-III/UFH

| Mutation | Mutation | kₐₚₚ | ±S.D. | | k_{app-wt}/ | |
|---|---|---|---|---|---|---|
| (Mature FIX Numbering) | (Chymotrypsin Numbering) | (M⁻¹s⁻¹) | (M⁻¹s⁻¹) | % CV | kₐₚₚ₋ₘᵤₜ | n |
| BeneFIX ® Coagulation | BeneFIX ® Coagulation | 1.6E+07 | 1.7E+07 | 105% | 1 | 8 |
| FIX (T148A) | FIX (T[148]A) | | | | | |
| Catalyst Biosciences WT | Catalyst Biosciences WT | 2.4E+07 | 8.0E+06 | 33% | 1 | 4 |
| T148A | T[148]A | 1.6E+07 | 1.1E+07 | 69% | 1 | 4 |
| D203N/F205T | D39N/F41T | 8.1E+05 | 5.3E+05 | 66% | 30 | 3 |
| D85N/D203N/F205T | D[85]N/D39N/F41T | 2.7E+06 | 4.5E+05 | 17% | 9 | 2 |
| N260S | N95S | 1.1E+06 | 2.1E+04 | 2% | 21 | 2 |
| D104N/K106S/N260S | D[104]N/K[106]S/N95S | 7.0E+06 | 1.9E+06 | 27% | 3 | 3 |
| R318A | R150A | 6.9E+05 | 5.6E+04 | 8% | 35 | 2 |
| R318E | R150E | 1.6E+04 | 1.2E+03 | 7% | 1,452 | 2 |
| R318Y | R150Y | 6.4E+05 | 3.5E+05 | 55% | 37 | 5 |
| R312Y | R143Y | 2.3E+05 | 4.5E+04 | 19% | 102 | 3 |
| R403A | R233A | 1.4E+06 | 3.1E+05 | 23% | 18 | 2 |
| R403E | R233E | 1.1E+05 | 2.4E+04 | 21% | 209 | 2 |
| K400E | K230E | 4.1E+05 | 3.3E+04 | 8% | 58 | 2 |
| K293E | K126E | 1.2E+06 | 8.4E+04 | 7% | 20 | 2 |
| R338E | R170E | 2.7E+05 | 1.7E+05 | 64% | 88 | 3 |
| R338A/R403A | R170A/R233A | 8.4E+05 | 4.6E+04 | 5% | 28 | 2 |
| R338E/R403E | R170E/R233E | 6.8E+04 | 1.9E+04 | 28% | 353 | 2 |
| K293A/R403A | K126A/R233A | 8.1E+04 | 1.5E+04 | 18% | 294 | 2 |
| K293A/R338A/R403A | K126A/R170A/R233A | 4.7E+04 | 7.9E+03 | 17% | 511 | 2 |
| K293E/R338E/R403E | K126E/R170E/R233E | 3.1E+04 | 6.3E+03 | 20% | 768 | 2 |
| R318A/R403A | R150A/R233A | 1.7E+04 | 4.7E+03 | 27% | 1,390 | 2 |
| R318Y/E410N | R150Y/E240N | 1.1E+06 | 7.9E+03 | 1% | 22 | 2 |
| R338E/E410N | R170E/E240N | 6.3E+06 | 7.4E+06 | 117% | 4 | 10 |
| R338E/R403E/E410N | R170E/R233E/E240N | 1.3E+05 | 1.5E+05 | 115% | 180 | 14 |
| Y155F/R338E/R403E/E410N | Y[155]F/R170E/R233E/E240N | 3.2E+04 | 1.7E+03 | 5% | 755 | 2 |
| R318Y/R338E/R403E | R150Y/R170E/R233E | 1.2E+03 | 9.9E+02 | 80% | 19,396 | 7 |
| Y155F/R318Y/R338E/R403E | Y[155]F/R150Y/R170E/R233E | 1.0E+03 | 5.4E+01 | 5% | 23,242 | 2 |
| D203N/F205T/K228N | D39N/F41T/K63N | 1.1E+06 | 3.7E+05 | 33% | 21 | 2 |
| D203N/F205T/E410N | D39N/F41T/E240N | 2.0E+06 | 2.1E+05 | 10% | 12 | 2 |
| D203N/F205T/R338E | D39N/F41T/R170E | 3.6E+05 | 2.8E+04 | 8% | 66 | 2 |
| D203N/F205T/R338A | D39N/F41T/R170A | 8.6E+05 | 1.6E+05 | 18% | 28 | 2 |
| D203N/F205T/R318Y | D39N/F41T/R150Y | 6.1E+04 | 2.0E+04 | 33% | 391 | 2 |
| D203N/F205T/R338E/R403E | D39N/F41T/R170E/R233E | 2.0E+03 | n.d. | n.d. | 12,250 | 1 |
| K228N/R318Y | K63N/R150Y | 1.2E+06 | 2.1E+05 | 17% | 19 | 2 |
| K228N/R338E/R403E | K63N/R170E/R233E | 4.2E+04 | 1.3E+04 | 31% | 567 | 2 |
| R403E/E410N | R233E/E240N | 4.8E+06 | 2.5E+06 | 53% | 5 | 5 |
| R318Y/R338E/E410N | R150Y/R170E/E240N | 2.8E+05 | 2.4E+05 | 85% | 84 | 8 |
| D104N/K106S/R318Y/R338E/ | D[104]N/K[106]S/R150Y/R170E/ | 2.1E+05 | 4.2E+04 | 20% | 113 | 2 |
| E410N | E240N | | | | | |
| Y155F/R318Y/R338E/E410N | Y[155]F/R150Y/R170E/E240N | 4.5E+05 | 6.9E+04 | 15% | 53 | 2 |
| K228N/R318Y/E410N | K63N/R150Y/E240N | 1.9E+06 | n.d. | n.d. | 12 | 1 |
| R318Y/R403E/E410N | R150Y/R233E/E240N | 2.8E+04 | 1.8E+04 | 63% | 856 | 6 |
| Y155F/R318Y/R403E/E410N | Y[155]F/R150Y/R233E/E240N | 8.1E+03 | 1.4E+02 | 2% | 2,963 | 2 |
| R318Y/R338E/R403E/E410N | R150Y/R170E/R233E/E240N | 3.2E+03 | 2.0E+03 | 63% | 7,385 | 6 |
| A103N/N105S/R318Y/R338E/ | A[103]N/N[105]S/R150Y/R170E/ | 2.6E+03 | 1.7E+02 | 7% | 9,060 | 2 |
| R403E/E410N | R233E/E240N | | | | | |
| D104N/K106S/R318Y/R338E/ | D[104]N/K[106]S/R150Y/R170E/ | 3.9E+03 | 1.6E+01 | 0% | 6,154 | 2 |
| R403E/E410N | R233E/E240N | | | | | |
| Y155F/R318Y/R338E/R403E/ | Y[155]F/R150Y/R170E/R233E/ | 3.2E+03 | 8.1E+02 | 25% | 7,464 | 3 |
| E410N | E240N | | | | | |
| A103N/N105S/Y155F/R318Y/ | A[103]N/N[105]S/Y[155]F/ | 3.2E+03 | 6.7E+00 | 0% | 7,531 | 2 |
| R338E/R403E/E410N | R150Y/R170E/R233E/E240N | | | | | |
| D104N/K106S/Y155F/R318Y/ | D[104]N/K[106]S/Y[155]F/ | 2.9E+03 | 1.8E+02 | 6% | 8,147 | 2 |
| R338E/R403E/E410N | R150Y/R170E/R233E/E240N | | | | | |
| D203N/F205T/R318Y/E410N | D39N/F41T/R150Y/E240N | 5.3E+04 | 5.8E+03 | 11% | 454 | 3 |
| N346D | N178D | 3.4E+06 | 1.6E+06 | 48% | 7 | 4 |
| Y155F/N346D | Y[155]F/N178D | 4.0E+06 | 5.4E+05 | 13% | 6 | 2 |
| N346Y | N178Y | 8.4E+05 | n.d. | n.d. | 28 | 1 |
| Y345T | Y177T | 1.8E+06 | 7.8E+03 | 0% | 13 | 2 |
| T343R | T175R | 4.2E+06 | 1.0E+04 | 0% | 6 | 2 |
| T343Q | T175Q | 2.1E+06 | 5.4E+05 | 25% | 11 | 2 |
| T343R/Y345T | T175R/Y177T | 5.0E+06 | 1.8E+05 | 4% | 5 | 2 |
| R318Y/R338E | R150Y/R170E | 6.2E+05 | 5.4E+04 | 9% | 39 | 2 |
| K228N/R318Y/R338E/R403E/ | K63N/R150Y/R170E/R233E/ | 2.9E+03 | 2.2E+02 | 7% | 8,212 | 2 |
| E410N | E240N | | | | | |
| Y155F/K228N/R318Y/R338E/ | Y[155]F/K63N/R150Y/R170E/ | 4.6E+03 | 6.1E+02 | 13% | 5,161 | 2 |
| R403E/E410N | R233E/E240N | | | | | |
| D85N/K228N/R318Y/R338E/ | D[85]N/K63N/R150Y/R170E/ | 3.0E+03 | 3.2E+02 | 11% | 7,932 | 2 |
| R403E/E410N | R233E/E240N | | | | | |
| I251S/R318Y/R338E/R403E/ | I86S/R150Y/R170E/R233E/ | 3.0E+03 | 3.5E+02 | 12% | 7,940 | 2 |
| E410N | E240N | | | | | |
| D104N/K106S/I251S/R318Y/ | D[104]N/K[106]S/I86S/R150Y/ | 5.7E+03 | 8.4E+02 | 15% | 4,225 | 2 |
| R338E/R403E/E410N | R170E/R233E/E240N | | | | | |
| Y155F/I251S/R318Y/R338E/ | D[104]N/K[106]S/I86S/R150Y/ | 3.3E+03 | 1.4E+02 | 4% | 7,306 | 2 |
| R403E/E410N | R170E/R233E/E240N | | | | | |
| I251S/R318Y/R338E/E410N | I86S/R150Y/R170E/E240N | 2.4E+05 | 2.1E+05 | 89% | 100 | 6 |
| D104N/K106S/I251S/R318Y/ | D[104]N/K[106]S/I86S/R150Y/ | 3.2E+03 | 4.5E+02 | 14% | 7,567 | 2 |
| R338E/E410N | R170E/E240N | | | | | |
| K247N/N249S/R318Y/R338E/ | K82N/N84S/R150Y/R170E/ | 2.0E+03 | 1.0E+03 | 53% | 12,122 | 2 |
| R403E/E410N | R233E/E240N | | | | | |
| Y155F/K247N/N249S/R318Y/ | Y[155]F/K82N/N84S/R150Y/ | 1.6E+03 | 5.9E+02 | 37% | 15,058 | 4 |
| R338E/R403E/E410N | R170E/R233E/E240N | | | | | |
| A103N/N105S/K247N/N249S/ | A[103]N/N[105]S/K82N/N84S/ | 1.7E+03 | 2.4E+02 | 14% | 14,063 | 3 |
| R318Y/R338E/R403E/E410N | R150Y/R170E/R233E/E240N | | | | | |
| D104N/K106S/K247N/N249S/ | D[104]N/K[106]S/K82N/N84S/ | 3.1E+03 | 7.6E+02 | 24% | 7,646 | 3 |
| R318Y/R338E/R403E/E410N | R150Y/R170E/R233E/E240N | | | | | |
| D104N/K106S/Y155F/K247N/ | D[104]N/K[106]S/Y[155]F/ | 1.0E+03 | 2.8E+02 | 28% | 23,776 | 6 |
| N249S/R318Y/R338E/R403E/ | K82N/N84S/R150Y/R170E/ | | | | | |
| E410N | R233E/E240N | | | | | |
| K247N/N249S/R318Y/R338E/ | K82N/N84S/R150Y/R170E/ | 8.6E+05 | 1.2E+05 | 14% | 28 | 2 |
| E410N | E240N | | | | | |
| Y155F/K247N/N249S/R318Y/ | Y[155]F/K82N/N84S/R150Y/ | 1.8E+05 | 2.2E+04 | 13% | 136 | 2 |
| R338E/E410N | R170E/E240N | | | | | |
| R318Y/R338E/R403E/E410S | R150Y/R170E/R233E/E240S | 1.6E+03 | 1.1E+03 | 64% | 14,483 | 7 |
| R318Y/R338E/E410S | R150Y/R170E/E240S | 7.2E+05 | 4.8E+05 | 66% | 33 | 2 |
| K228N/K247N/N249S/R318Y/ | K63N/K82N/N84S/R150Y/ | 1.1E+03 | 4.5E+02 | 41% | 21,766 | 12 |
| R338E/R403E/E410N | R170E/R233E/E240N | | | | | |
| D104N/K106S/K228N/K247N/ | D[104]N/K[106]S/K63N/K82N/ | 6.8E+02 | 3.3E+02 | 48% | 35,018 | 4 |
| N249S/R318Y/R338E/R403E/ | N84S/R150Y/R170E/R233E/ | | | | | |
| E410N | E240N | | | | | |
| Y155F/K228N/K247N/N249S/ | Y[155]F/K63N/K82N/N84S/ | 1.1E+03 | 3.9E+01 | 4% | 21,856 | 4 |
| R318Y/R338E/R403E/E410N | R150Y/R170E/R233E/E240N | | | | | |
| R318Y/R338E/R403E/E410N/ | R150Y/R170E/R233E/E240N/ | 2.9E+03 | 5.4E+02 | 19% | 8,296 | 5 |
| T412V | T242V | | | | | |
| R318Y/R338E/R403E/E410N/ | R150Y/R170E/R233E/E240N/ | 3.8E+03 | 1.2E+03 | 31% | 6,322 | 5 |
| T412A | T242A | | | | | |
| R318Y/R338E/R403E/T412A | R150Y/R170E/R233E/T242A | 1.6E+03 | 3.8E+02 | 23% | 14,529 | 2 |
| R318Y/R338E/T412A | R150Y/R170E/T242A | 3.5E+05 | 7.2E+04 | 21% | 69 | 3 |
| R318Y/R338E/E410N/T412V | R150Y/R170E/E240N/T242V | 3.9E+05 | 2.6E+04 | 7% | 61 | 2 |
| N260S/R318Y/R338E/R403E/ | N95S/R150Y/R170E/R233E/ | 4.4E+03 | 8.5E+02 | 19% | 5,407 | 2 |
| E410N | E240N | | | | | |
| D104N/K106S/N260S/R318Y/ | D[104]N/K[106]S/N95S/R150Y/ | 2.1E+03 | 3.9E+02 | 18% | 11,173 | 2 |
| R338E/R403E/E410N | R170E/R233E/E240N | | | | | |
| Y155F/N260S/R318Y/R338E/ | Y[155]F/N95S/R150Y/R170E/ | 2.1E+03 | 2.4E+02 | 11% | 11,456 | 2 |
| R403E/E410N | R233E/E240N | | | | | |
| R318Y/R338E/N346D/R403E/ | R150Y/R170E/N178D/R233E/ | 1.1E+03 | 5.5E+02 | 49% | 21,504 | 6 |
| E410N | E240N | | | | | |
| Y155F/R318Y/R338E/N346D/ | Y[155]F/R150Y/R170E/N178D/ | 1.6E+03 | 6.6E+02 | 41% | 14,831 | 3 |
| R403E/E410N | R233E/E240N | | | | | |
| D104N/K106S/K247N/N249S/ | D[104]N/K[106]S/K82N/N84S/ | 1.7E+06 | 8.7E+04 | 5% | 14 | 2 |
| N260S | N95S | | | | | |
| D104N/K106S/Y155F/K247N/ | D[104]N/K[106]S/Y[155]F/ | 3.2E+06 | 2.1E+05 | 6% | 7 | 2 |
| N249S/N260S | K82N/N84S/N95S | | | | | |
| K247N/N249S/N260S/R318Y/ | K82N/N84S/N95S/R150Y/ | 1.3E+03 | 3.8E+02 | 30% | 18,567 | 2 |
| R338E/R403E/E410N | R170E/R233E/E240N | | | | | |
| Y155F/K247N/N249S/N260S/ | Y[155]F/K82N/N84S/N95S/ | 4.3E+02 | 3.8E+00 | 1% | 55,342 | 4 |
| R318Y/R338E/R403E/E410N | R150Y/R170E/R233E/E240N | | | | | |
| R318Y/R338E/T343R/R403E/ | R150Y/R170E/T175R/R233E/ | 3.2E+04 | 2.2E+04 | 69% | 749 | 6 |
| E410N | E240N | | | | | |
| Y155F/R318Y/R338E/T343R/ | Y[155]F/R150Y/R170E/T175R/ | 8.6E+03 | 5.4E+03 | 63% | 2,774 | 6 |
| R403E/E410N | R233E/E240N | | | | | |
| D104N/K106S/R318Y/R338E/ | D[104]N/K[106]S/R150Y/R170E/ | 9.1E+03 | 2.4E+03 | 27% | 2,636 | 4 |
| T343R/R403E/E410N | T175R/R233E/E240N | | | | | |
| R338E/T343R | R170E/T175R | 3.4E+06 | 4.8E+05 | 14% | 7 | 2 |
| T343R/N346Y | T175R/N178Y | 4.2E+06 | 4.0E+06 | 95% | 6 | 4 |
| R318Y/R338E/N346Y/R403E/ | R150Y/R170E/N178Y/R233E/ | 2.8E+03 | 4.4E+02 | 16% | 8,498 | 2 |
| E410N | E240N | | | | | |
| R318Y/R338E/T343R/N346Y/ | R150Y/R170E/T175R/N178Y/ | 1.1E+04 | 4.3E+03 | 37% | 2,086 | 4 |
| R403E/E410N | R233E/E240N | | | | | |
| T343R/N346D | T175R/N178D | 1.3E+06 | 2.3E+05 | 18% | 18 | 2 |
| R318Y/R338E/T343R/N346D/ | R150Y/R170E/T175R/N178D/ | 5.1E+03 | 3.7E+01 | 1% | 4,726 | 2 |
| R403E/E410N | R233E/E240N | | | | | |
| R318Y/R338E/Y345A/R403E/ | R150Y/R170E/Y177A/R233E/ | 7.9E+03 | 1.2E+03 | 16% | 3,015 | 2 |
| E410N | E240N | | | | | |
| Y155F/K247N/N249S/R318Y/ | Y[155]F/K82N/N84S/R150Y/ | 8.1E+02 | 1.6E+02 | 20% | 29,512 | 4 |
| R338E/R403E | R170E/R233E | | | | | |
| K247N/N249S/R318Y/R338E/ | K82N/N84S/R150Y/R170E/ | 3.1E+02 | 2.1E+02 | 67% | 76,373 | 4 |
| R403E | R233E | | | | | |
| Y155F/K247N/N249S/R318Y/ | Y[155]F/K82N/N84S/R150Y/ | 7.3E+03 | 2.0E+01 | 0% | 3,291 | 2 |
| R403E/E410N | R233E/E240N | | | | | |
| K247N/N249S/R318Y/R403E/ | K82N/N84S/R150Y/R233E/ | 2.7E+03 | 9.3E+02 | 35% | 8,942 | 6 |
| E410N | E240N | | | | | |
| Y155F/K247N/N249S/R338E/ | Y[155]F/K82N/N84S/R170E/ | 4.2E+04 | 4.3E+02 | 1% | 572 | 2 |
| R403E/E410N | R233E/E240N | | | | | |
| K247N/N249S/R338E/R403E/ | K82N/N84S/R170E/R233E/ | 2.1E+04 | 1.5E+03 | 7% | 1,148 | 2 |
| E410N | E240N | | | | | |
| R318Y/R338E/T343R/R403E | R150Y/R170E/T175R/R233E | 5.8E+03 | 8.6E+02 | 15% | 4,118 | 2 |
| Y155F/R318Y/R338E/T343R/ | Y[155]F/R150Y/R170E/T175R/ | 2.8E+03 | 3.8E+02 | 14% | 8,515 | 6 |
| R403E | R233E | | | | | |
| R318Y/R338E/T343R/E410N | R150Y/R170E/T175R/E240N | 5.4E+05 | 3.2E+05 | 58% | 44 | 8 |
| Y155F/R318Y/R338E/T343R/ | Y[155]F/R150Y/R170E/T175R/ | 7.8E+05 | 6.1E+05 | 79% | 31 | 4 |
| E410N | E240N | | | | | |
| R318Y/T343R/R403E/E410N | R150Y/T175R/R233E/E240N | 9.3E+04 | 1.2E+04 | 13% | 257 | 2 |
| Y155F/R318Y/T343R/R403E/ | Y[155]F/R150Y/T175R/R233E/ | 5.5E+04 | 7.8E+03 | 14% | 436 | 4 |
| E410N | E240N | | | | | |
| R338E/T343R/R403E/E410N | R170E/T175R/R233E/E240N | 3.4E+05 | 2.7E+03 | 1% | 70 | 2 |
| Y155F/R338E/T343R/R403E/ | Y[155]F/R170E/T175R/R233E/ | 2.8E+05 | 1.7E+04 | 6% | 85 | 4 |
| E410N | E240N | | | | | |
| Y155F/K247N/N249S/R318Y/ | Y[155]F/K82N/N84S/R150Y/ | 8.7E+03 | 1.9E+03 | 22% | 2,733 | 8 |
| R338E/T343R/R403E/E410N | R170E/T175R/R233E/E240N | | | | | |
| K247N/N249S/R318Y/R338E/ | K82N/N84S/R150Y/R170E/ | 9.6E+03 | 2.4E+03 | 25% | 2,499 | 4 |
| T343R/R403E/E410N | T175R/R233E/E240N | | | | | |
| K228N/I251S/R318Y/R338E/ | K63N/I86S/R150Y/R170E/ | 9.0E+02 | 2.2E+02 | 25% | 26,598 | 4 |
| R403E/E410N | R233E/E240N | | | | | |
| Y155F/K228N/I251S/R318Y/ | Y[155]F/K63N/I86S/R150Y/ | 1.3E+03 | 2.8E+02 | 21% | 17,778 | 6 |
| R338E/R403E/E410N | R170E/R233E/E240N | | | | | |
| N260S/R318Y/R338E/T343R/ | N95S/R150Y/R170E/T175R/ | 2.6E+03 | 5.6E+02 | 22% | 9,317 | 4 |
| R403E/E410N | R233E/E240N | | | | | |
| Y155F/N260S/R318Y/R338E/ | Y[155]F/N95S/R150Y/R170E/ | 2.6E+03 | 6.6E+02 | 25% | 9,148 | 4 |
| T343R/R403E/E410N | T175R/R233E/E240N | | | | | |
| K228N/K247N/N249S/R318Y/ | K63N/K82N/N84S/R150Y/ | 5.3E+03 | 1.8E+03 | 34% | 4,468 | 10 |
| R338E/T343R/R403E/E410N | R170E/T175R/R233E/E240N | | | | | |
| Y155F/K228N/K247N/N249S/ | Y[155]F/K63N/K82N/N84S/ | 2.2E+03 | 1.4E+03 | 62% | 10,758 | 4 |
| R318Y/R338E/T343R/R403E/ | R150Y/R170E/T175R/R233E/ | | | | | |
| E410N | E240N | | | | | |
| Y155F/R338E/T343R/R403E | Y[155]F/R170E/T175R/R233E | 9.3E+04 | 1.2E+04 | 13% | 257 | 4 |
| R338E/T343R/R403E | R170E/T175R/R233E | 1.9E+05 | 7.1E+02 | 0% | 125 | 2 |
| Y155F/R338E/T343R/R403E/ | Y[155]F/R170E/T175R/R233E/ | 2.2E+05 | 2.6E+04 | 12% | 110 | 6 |
| E410S | E240S | | | | | |
| Y155F/N260S/R338E/T343R/ | Y[155]F/N95S/R170E/T175R/ | 4.0E+04 | 7.6E+03 | 19% | 601 | 4 |
| R403E | R233E | | | | | |
| Y155F/I251S/R338E/T343R/ | Y[155]F/I86S/R170E/T175R/ | 1.6E+05 | 1.5E+04 | 9% | 146 | 2 |
| R403E | R233E | | | | | |
| R318Y/R338E/T343R/R403E/ | R150Y/R170E/T175R/R233E/ | 9.9E+03 | 2.9E+03 | 30% | 2,417 | 22 |
| E410S | E240S | | | | | |
| Y155F/K247N/N249S/T343R/ | Y[155]F/K82N/N84S/T175R/ | 1.4E+05 | 2.3E+04 | 16% | 168 | 4 |
| R403E | R233E | | | | | |
| Y155F/K247N/N249S/R318Y/ | Y[155]F/K82N/N84S/R150Y/ | 2.3E+03 | 1.7E+02 | 8% | 10,415 | 2 |
| R338E/T343R/R403E | R170E/T175R/R233E | | | | | |
| K247N/N249S/R318Y/R338E/ | K82N/N84S/R150Y/R170E/ | 1.7E+03 | 2.0E+02 | 12% | 14,156 | 4 |
| T343R/R403E | T175R/R233E | | | | | |
| Y155F/K247N/N249S/R338E/ | Y[155]F/K82N/N84S/R170E/ | 8.9E+04 | 1.1E+04 | 13% | 268 | 4 |
| T343R/R403E/E410N | T175R/R233E/E240N | | | | | |
| K247N/N249S/R338E/T343R/ | K82N/N84S/R170E/T175R/ | 8.6E+04 | 1.1E+04 | 13% | 276 | 4 |
| R403E/E410N | R233E/E240N | | | | | |
| Y155F/K247N/N249S/R318Y/ | Y[155]F/K82N/N84S/R150Y/ | 2.7E+04 | 1.4E+04 | 50% | 889 | 4 |
| R338E | R170E | | | | | |
| Y155F/K247N/N249S/R318Y/ | Y[155]F/K82N/N84S/R150Y/ | 4.0E+05 | 2.9E+05 | 72% | 60 | 8 |
| T343R | T175R | | | | | |
| Y155F/K247N/N249S/R318Y/ | Y[155]F/K82N/N84S/R150Y/ | 2.1E+03 | 5.3E+01 | 2% | 11,125 | 2 |
| R403E | R233E | | | | | |
| Y155F/K247N/N249S/R318Y/ | Y[155]F/K82N/N84S/R150Y/ | 1.3E+05 | 9.5E+04 | 75% | 188 | 6 |
| E410N | E240N | | | | | |
| Y155F/K247N/N249S/R338E/ | Y[155]F/K82N/N84S/R170E/ | 1.3E+04 | 1.0E+03 | 8% | 1,819 | 2 |
| R403E | R233E | | | | | |
| Y155F/K247N/N249S/R338E/ | Y[155]F/K82N/N84S/R170E/ | 1.2E+07 | 6.2E+06 | 51% | 2 | 4 |
| T343R | T175R | | | | | |
| Y155F/K247N/N249S/R318Y/ | Y[155]F/K82N/N84S/R150Y/ | 2.2E+05 | 1.0E+05 | 45% | 107 | 4 |
| R338E/T343R/E410N | R170E/T175R/E240N | | | | | |
| K247N/N249S/R318Y/R338E/ | K82N/N84S/R150Y/R170E/ | 2.1E+05 | 8.2E+04 | 39% | 114 | 4 |
| T343R/E410N | T175R/E240N | | | | | |
| Y155F/K247N/N249S/R318Y/ | Y[155]F/K82N/N84S/R150Y/ | 2.8E+04 | 5.6E+03 | 20% | 842 | 4 |
| T343R/R403E/E410N | T175R/R233E/E240N | | | | | |
| K247N/N249S/R318Y/T343R/ | K82N/N84S/R150Y/T175R/ | 2.5E+04 | 8.0E+03 | 32% | 962 | 6 |
| R403E/E410N | R233E/E240N | | | | | |
| Y155F/K247N/N249S/R338E/ | Y[155]F/K82N/N84S/R170E/ | 2.9E+06 | 2.2E+06 | 77% | 8 | 6 |
| E410N | E240N | | | | | |
| Y155F/K247N/N249S/R318Y/ | Y[155]F/K82N/N84S/R150Y/ | 1.2E+04 | 1.0E+03 | 9% | 2,011 | 4 |
| T343R/R403E | T175R/R233E | | | | | |
| K247N/N249S/R318Y/T343R/ | K82N/N84S/R150Y/T175R/ | 9.8E+03 | 2.5E+03 | 26% | 2,430 | 12 |
| R403E | R233E | | | | | |
| Y155F/K247N/N249S/R318Y/ | Y[155]F/K82N/N84S/R150Y/ | 3.6E+05 | 1.2E+05 | 32% | 66 | 4 |
| T343R/E410N | T175R/E240N | | | | | |
| K247N/N249S/R318Y/T343R/ | K82N/N84S/R150Y/T175R/ | 4.9E+04 | 6.5E+03 | 13% | 487 | 4 |
| E410N | E240N | | | | | |
| Y155F/K247N/N249S/R338E/ | Y[155]F/K82N/N84S/R170E/ | 4.4E+04 | 1.1E+04 | 26% | 549 | 4 |
| T343R/R403E | T175R/R233E | | | | | |
| K247N/N249S/R338E/T343R/ | K82N/N84S/R170E/T175R/ | 5.0E+04 | 1.7E+04 | 35% | 482 | 4 |
| R403E | R233E | | | | | |
| K247N/N249S/R338E/T343R/ | K82N/N84S/R170E/T175R/ | 1.4E+07 | 7.2E+06 | 53% | 2 | 5 |
| E410N | E240N | | | | | |
| Y155F/K247N/N249S/T343R/ | Y[155]F/K82N/N84S/T175R/ | 6.2E+05 | 5.6E+04 | 9% | 39 | 4 |
| R403E/E410N | R233E/E240N | | | | | |
| K247N/N249S/T343R/R403E/ | K82N/N84S/T175R/R233E/ | 4.2E+05 | 8.1E+04 | 19% | 58 | 4 |
| E410N | E240N | | | | | |
| Y155F/R318Y/R338E/T343R | Y[155]F/R150Y/R170E/T175R | 4.4E+05 | 1.9E+05 | 43% | 55 | 6 |
| R318Y/R338E/T343R | R150Y/R170E/T175R | 1.8E+06 | 8.6E+05 | 48% | 13 | 4 |
| Y155F/R318Y/T343R/R403E | Y[155]F/R150Y/T175R/R233E | 1.1E+04 | 9.1E+02 | 8% | 2,114 | 2 |
| Y155F/T343R/R403E/E410N | Y[155]F/T175R/R233E/E240N | 8.8E+05 | 3.3E+03 | 0% | 27 | 2 |
| Y155F/K247N/N249S/R318Y/ | Y[155]F/K82N/N84S/R150Y/ | 3.7E+05 | 1.1E+05 | 28% | 64 | 6 |
| R338E/T343R | R170E/T175R | | | | | |
| K247N/N249S/R318Y/R338E/ | K82N/N84S/R150Y/R170E/ | 3.2E+05 | 1.4E+05 | 44% | 74 | 6 |
| T343R | T175R | | | | | |
| Y155F/K247N/N249S/T343R/ | Y[155]F/K82N/N84S/T175R/ | 3.5E+06 | 4.8E+05 | 14% | 7 | 2 |
| E410N | E240N | | | | | |
| Y155F/K247N/N249S/R403E/ | Y[155]F/K82N/N84S/R233E/ | 1.3E+05 | 3.3E+04 | 26% | 191 | 14 |
| E410N | E240N | | | | | |
| Y155F/R338E/T343R/E410N | Y[155]F/R170E/T175R/E240N | 1.3E+07 | 1.0E+07 | 78% | 2 | 6 |
| R338E/T343R/E410N | R170E/T175R/E240N | 2.0E+07 | 6.3E+06 | 31% | 1 | 4 |
| Y155F/R318Y/T343R/E410N | Y[155]F/R150Y/T175R/E240N | 2.0E+05 | 5.9E+04 | 29% | 118 | 4 |
| R318Y/T343R/E410N | R150Y/T175R/E240N | 1.2E+06 | 1.1E+05 | 9% | 20 | 2 |
| K228N/R150Y/R338E/T343R/ | K63N/R150Y/R170E/T175R/ | 7.1E+03 | 3.3E+02 | 5% | 3,343 | 2 |
| R403E/E410N | R233E/E240N | | | | | |
| K228N/K247N/N249S/R318Y/ | K63N/K82N/N84S/R150Y/ | 1.0E+03 | 2.3E+02 | 22% | 23,389 | 2 |
| R338E/T343R/R403E | R170E/T175R/R233E | | | | | |
| K228N/247N/N249S/R318Y/ | K63N/K82N/N84S/R150Y/ | 6.3E+05 | 1.0E+05 | 17% | 38 | 2 |
| R338E/T343R/E410N | R170E/T175R/E240N | | | | | |
| K228N/K247N/N249S/R318Y/ | K63N/K82N/N84S/R150Y/ | 1.7E+04 | 2.4E+03 | 14% | 1,422 | 2 |
| T343R/R403E/E410N | T175R/R233E/E240N | | | | | |

### Example 6

### Pharmacokinetic and Pharmacodynamic Analysis of FIXa Polypeptides

[0602] The pharmacokinetic (PK) and pharmacodynamic (PD) properties of the FIXa variant polypeptides were assessed by measuring the amount of variant FIX in mouse plasma at various time points following intravenous administration. Two assays were used to quantify FIXa in plasma. An ELISA was used to quantify total FIX protein in mouse plasma to assess the pharmacokinetic properties, and a FIX-dependent clotting assay (activated partial thromboplastin time (aPTT) assay using FIX-depleted plasma) was used to quantify the coagulant activity of the FIX polypeptides in plasma, thus assessing the pharmacodynamic properties.

[0603] Animals

[0604] Male CD-1 mice (30-40 gm), supplied by Charles River Laboratories (Hollister, Calif.) were quarantined for at least 3 days before treatment. For serial PK studies, male CD-1 mice (30-37 gm) were fitted with an indwelling jugular vein cannula. Filtered tap water and food was available ad libitum prior to use in PD or PK experiments.

### A. Dosing and Blood Collection

[0605] Mice (N=3 per time point) were administered the FIX polypeptides intravenously (˜1.4 mg/kg for PK studies and ˜400 IU/kg for PD studies, dose volume 2 ml/kg) via the tail vein. At the appropriate time after dosing, animals were anesthetized and blood was drawn (0.5-1 mL) using terminal cardiac puncture into syringes containing citrate. In some experiments where insufficient amount of protein was available, a total of only 4-6 animals were used for serial bleeding at staggered time points; two mice were used for each full time course in order to collect all time points without removing excess blood volume. Blood was sampled in restrained conscious animals by first removing a small amount of blood into a 0.1 mL syringe containing 0.9% saline. A syringe containing 4.5 μl of 0.1M sodium citrate was then attached and 0.05 mL blood was withdrawn into the syringe and the blood was transferred to a 1.5 mL tube. The initial syringe was reattached and 0.07 mL of saline pushed back through the cannula. The cannula was capped until the next time point, when the process was repeated. For all studies, blood samples were centrifuged within 15 minutes of collection (9000 rpm, 8 minutes, 4° C.) and the plasma removed and immediately flash frozen in liquid nitrogen and then stored frozen (−70° C.) pending analysis.

### A. PK Assessment

[0606] Citrated blood samples were collected at various times up to 1440 min post dose (i.e., Predose, 2, 4, 10, 30, 60, 120, 240, 360, 480, 960 and 1440 min) by cardiac puncture for terminal experiments or indwelling catheter for serial experiments. Plasma concentrations of rFIX were determined using a factor IX specific ELISA utilizing a matched pair of detection and capture antibodies (#FIX-EIA, Affinity Biologicals, Ancaster, ON). Briefly, an affinity purified polyclonal antibody to FIX is coated onto the wells of a plate. The plates are washed and plasma samples containing FIX are applied. Plasma samples are diluted 1:750 and 1:1500 on the plate. After washing the plate to remove unbound material, a peroxidase conjugated detection antibody to FIX is added to the plate to bind to the captured FIX. After washing the plate to remove unbound conjugated antibody, the peroxidase activity is expressed by incubation with chemiluminescent substrate and read at 425 nM on an EnVision plate reader. The standard curve is linear over the entire concentration range and spans the concentrations of 0.82 pg/ml to 30 ng/ml. The FIX variant itself is used for the standard curve to eliminate differences in the antibody affinity. Each sample is measured on two separate assay plates and those measurements within the range of the standard curve are used to calculate the concentration of FIX variants in the plasma sample.

[0607] PD Assessment

[0608] The plasma pharmacodynamic activity of rFIX was quantified using an activated partial thromboplastin time (aPTT) assay and FIX deficient human plasma (STACLOT C.K. PREST kit, Diagnostica Stago, Asnieres, France) per the manufacturer's instructions. Briefly, the aPTT assay involves the recalcification of plasma in the presence of cephalin (platelet substitute) and activator (koalin). Using FIX deficient human plasma, the aPTT assay is specific for FIX. The aPTT assay was performed as described in the manufacturers' product insert. Briefly, citrated blood samples were collected at the same time points described for PK assessment. Plasma samples were diluted 1:100 in Tris buffered saline containing 0.1% bovine serum albumin (Probumin, Millipore, Billerica, Mass.). Diluted plasma or standard was combined with FIX deficient human plasma and cephalin/kaolin reagent and incubated for 180 seconds. Coagulation was initiated by the addition of calcium (CaCl₂)). Coagulation time in seconds was measured using a STArt4 instrument (Diagnostica Stago, Asnieres, France). Using a standard curve made from known concentrations of rFIX, plasma FIX concentrations were interpolated from the log concentration VS. log time standard curve plot and then background FIX activity (from pre dose animals) was subtracted. The lower limit of quantification for factor IX activity was ˜10 ng/mL.

[0609] PD and PK Data Analysis

[0610] PD (aPTT) and PK (ELISA) parameters from mouse studies with rFIX variants were calculated using non-compartmental analysis in WinNonLin (v5.1, Pharsight Corp., Mountain View, Calif.). Both the PD and PK of rFIX variants followed apparent biexponential plasma decay. Select parameters for each variant tested are provided in Table 34 for PD (using the aPTT assay) and Tables 35-36 for PK (using the ELISA assay). Table 35 reflects data for additional FIXa variants and provide new overall averages calculated to include additional experimental replicates (n) for FIXa variants in Table 35. The PD parameters included half-life (terminal, min), MRT (MRT_{0-inf}, min), Area under the curve (AUC) 0-last (min·μg/mL)/Dose (mg/kg); Maximal concentration (Cₘₐₓ; (μg/mL)/Dose (μg/kg), Vd (mL/kg) and Clearance (Cl, mL/min/kg).

### Definitions and Formulae Used to Calculate Pharmacokinetic Parameters

[0611] Plasma half-life (the half-life of the FIX polypeptide during the terminal phase of plasma FIX concentration-versus-time profile); T_{1/2β} (calculated as −ln 2 divided by the negative slope during the terminal phase of the log-linear plot of the plasma FIX concentration-versus-time curve); MRT₀₋ₗₐₛₜ is the mean time the FIX polypeptide resides in body; calculated as AUMC₀₋ₗₐₛₜ/AUC₀₋ₗₐₛₜ, (where AUMC₀₋ₗₐₛₜ is the total area under the first moment-versus-time curve and AUC as described subsequently); AUC₀₋ₗₐₛₜ/Dose is calculated as [AUC₍₀₋ₜ₎], where t is the last time point with measurable plasma concentration of the FIX polypeptide divided by the IV dose (mg/kg); AUC_{0-inf}/Dose is calculated as [AUC₍₀₋ₜ₎+Ct/(ln 2/T_{1/2β}], where t is the last time point with measurable plasma concentration of the FIX polypeptide divided by the IV dose (mg/kg); Cₘₐₓ/Dose (μg/mL per mg/kg), where Cₘₐₓ is the time post dose corresponding to the maximal measured plasma FIX concentration; Cl is systemic clearance calculated as (Dose/AUC_{0-inf}); Vₛₛ is the steady state volume of distribution; calculated as MRT*Cl; and V_{z} is the volume of distribution based on the terminal elimination constant (β); calculated as Cl/(ln 2/T_{1/2β}).

TABLE 34
PD properties of FIX variants assessed by aPTT assay

| Mutation | | | | | | | | |
|---|---|---|---|---|---|---|---|---|
| (Mature FIX | | | | Cₘₐₓ/ | | | | |
| numbering) | N | T_{1/2β} | MRT_{0-inf} | dose | AUC_{0-inf} | Cl | Vz | Vss |
| BeneFIX ® | 2 | 296 | 354 | 19.3 | 2641 | 0.41 | 169 | 142 |
| Coagulation FIX | | | | | | | | |
| (T148A) | | | | | | | | |

TABLE 35
PK properties of FIX variants assessed by ELISA

| | | | MRT | | AUC/Dose | AUC/Dose | | |
|---|---|---|---|---|---|---|---|---|
| Mutation | N | T½_{β} | 0-inf | Cmax/Dose | 0-last | 0-inf | Vz | Cl |
| BeneFIX ® Coagulation FIX | 3 | 314 ± 128 | 366 ± 105 | 9.1 ± 1.5 | 1298 ± 298 | 1522 ± 158 | 308 ± 160 | 0.74 ± 0.06 |
| (T148A) | | | | | | | | |
| T148A | 8 | 383 ± 109 | 435 ± 128 | 10.2 ± 2.1 | 1620 ± 195 | 1747 ± 234 | 317 ± 82 | 0.58 ± 0.08 |
| Catalyst Biosciences WT | 2 | 329 | 360 | 11.9 | 2036 | 2121 | 229 | 0.48 |
| A103N/N105S | 2 | 375 | 481 | 12.5 | 2841 | 3068 | 177 | 0.33 |
| D104N/K106S | 2 | 428 | 558 | 13.9 | 3379 | 3786 | 164 | 0.26 |
| K106N/V108S | 2 | 510 | 629 | 12.8 | 2748 | 3202 | 234 | 0.32 |
| D85N | 2 | 528 | 607 | 9.5 | 1798 | 2046 | 372 | 0.49 |
| D64N | 2 | 447 | 519 | 11.8 | 1933 | 2152 | 304 | 0.47 |
| D64A | 2 | 364 | 372 | 11.5 | 1351 | 1466 | 359 | 0.68 |
| N167D | 2 | 334 | 318 | 8.9 | 1129 | 1176 | 410 | 0.85 |
| N167Q | 3 | 337 ± 8.8 | 323 ± 4.2 | 8.2 ± 1.2 | 1495 ± 258 | 1554 ± 268 | 318 ± 42 | 0.66 ± 0.10 |
| S61A | 2 | 397 | 412 | 10.0 | 1685 | 1800 | 325 | 0.57 |
| S53A | 2 | 382 | 462 | 11.2 | 2146 | 2321 | 238 | 0.43 |
| T159A | 2 | 232 | 227 | 10.5 | 1036 | 1048 | 315 | 0.97 |
| T169A | 2 | 348 | 319 | 8.3 | 836 | 889 | 567 | 1.15 |
| T172A | 3 | 494 ± 187 | 571 ± 214 | 11.2 ± 2.9 | 2055 ± 408 | 2366 ± 676 | 295 ± 31 | 0.45 ± 0.13 |
| T179A | 2 | 377 | 431 | 12.5 | 2291 | 2458 | 223 | 0.42 |
| Y155H | 2 | 465 | 552 | 11.6 | 2365 | 2638 | 253 | 0.38 |
| Y155Q | 1 | 552 | 645 | 13.6 | 2583 | 3045 | 262 | 0.33 |
| S158E | 2 | 433 | 471 | 14.5 | 2029 | 2222 | 291 | 0.46 |
| N157Q | 2 | 335 | 352 | 11.3 | 1185 | 1238 | 395 | 0.83 |
| N157D | 2 | 290 | 265 | 9.9 | 1166 | 1211 | 393 | 0.93 |
| Y155F | 2 | 443 | 567 | 18.1 | 3941 | 4375 | 149 | 0.23 |
| A103N/N105S/Y155F | 2 | 562 | 619 | 13.1 | 2427 | 2496 | 325 | 0.40 |
| D104N/K106S/Y155F | 3 | 514 ± 80 | 581 ± 81 | 13.8 ± 1.0 | 3057 ± 1032 | 3181 ± 989 | 243 ± 47 | 0.34 ± 0.13 |
| D203N/F205T | 3 | 481 ± 69 | 566 ± 29 | 9.4 ± 1.9 | 2028 ± 448 | 2289 ± 489 | 314 ± 91 | 0.45 ± 0.09 |
| D203N/F205T/D85N | 1 | 291 | 406 | 12.4 | 1538 | 2044 | 205 | 0.49 |
| K228N/D85N | 2 | 459 | 565 | 11.3 | 2616 | 2926 | 227 | 0.35 |
| K228N/A103N/N105S | 2 | 583 | 701 | 14.4 | 3032 | 3301 | 255 | 0.30 |
| K228N/D104N/K106S | 2 | 801 | 913 | 13.6 | 2050 | 2238 | 513 | 0.45 |
| K228N/Y155F | 2 | 626 | 679 | 8.6 | 2073 | 2149 | 431 | 0.47 |
| K228N/D104N/K106S/Y155F | 2 | 551 | 614 | 14.0 | 3730 | 3822 | 211 | 0.27 |
| I251S | 2 | 565 | 718 | 10.1 | 2646 | 3137 | 260 | 0.32 |
| I251S/A103N/N105S | 2 | 444 | 542 | 14.3 | 2445 | 2719 | 241 | 0.38 |
| I251S/D104N/K106S | 2 | 692 | 802 | 13.9 | 2533 | 2664 | 375 | 0.38 |
| I251S/Y155F | 2 | 572 | 660 | 12.2 | 2591 | 2790 | 291 | 0.37 |
| A262S | 3 | 373 ± 87 | 453 ± 91 | 14.4 ± 3.8 | 2716 ± 732 | 2926 ± 908 | 188 ± 29 | 0.36 ± 0.10 |
| E410N* | 2 | 439 | 551 | 7.4 | 893 | 1365 | 469 | 0.75 |
| E239N | 2 | 338 | 416 | 10.7 | 1657 | 1908 | 257 | 0.54 |
| K247N/N249S | 6 | 627 ± 174 | 734 ± 244 | 10.8 ± 3.4 | 2196 ± 737 | 2545 ± 795 | 387 ± 154 | 0.42 ± 0.11 |
| Y155F/K247N/N249S | 2 | 538 | 608 | 10.6 | 1752 | 1880 | 420 | 0.53 |
| K247N/N249S/A103N/N105S | 2 | 736 | 852 | 21.5 | 4369 | 4699 | 226 | 0.21 |
| K247N/N249S/D104N/K106S/ | 2 | 603 | 714 | 16.8 | 3744 | 3889 | 233 | 0.27 |
| Y155F | | | | | | | | |
| S319N/L321S | 2 | 351 | 427 | 11.4 | 2270 | 2409 | 210 | 0.42 |
| N260S | 3 | 496 ± 157 | 619 ± 170 | 11.5 ± 3.8 | 3364 ± 1300 | 3687 ± 1457 | 231 ± 156 | 0.30 ± 0.11 |
| D104N/K106S/N260S | 2 | 805 | 1001 | 16.1 | 4736 | 5248 | 220 | 0.20 |
| Y155F/N260S | 2 | 607 | 682 | 18.4 | 3408 | 3530 | 257 | 0.27 |
| Y284N | 2 | 400 | 478 | 9.0 | 2052 | 2210 | 270 | 0.46 |
| R318Y/E410N | 1 | 428 | 474 | 6.1 | 575 | 686 | 900 | 1.46 |
| R338E/E410N | 2 | 334 | 376 | 6.2 | 718 | 844 | 570 | 1.18 |
| R338E/R403E/E4100N | 5 | 436 ± 24 | 507 ± 29 | 13.4 ± 2.0 | 3052 ± 522 | 3302 ± 656 | 196 ± 49 | 0.31 ± 0.06 |
| D203N/F205T/E240N | 2 | 600 | 679 | 6.8 | 671 | 799 | 1080 | 1.25 |
| D203N/F205T/R338E | 2 | 307 | 419 | 9.3 | 1186 | 1586 | 281 | 0.63 |
| D203N/F205T/R338A | 2 | 317 | 403 | 9.0 | 1063 | 1397 | 327 | 0.72 |
| D203N/F205T/R318Y | 2 | 258 | 286 | 8.7 | 508 | 601 | 732 | 1.91 |
| D203N/F205T/R338E/R403E | 2 | 303 | 419 | 11.3 | 2105 | 2804 | 156 | 0.36 |
| K228N/E410N | 2 | 373 | 479 | 6.0 | 721 | 1025 | 522 | 0.98 |
| K228N/R338E | 2 | 248 | 340 | 10.4 | 1403 | 1736 | 207 | 0.58 |
| R318Y/R338E/E410N | 5 | 424 ± 306 | 515 ± 378 | 5.8 ± 1.6 | 645 ± 310 | 774 ± 454 | 778 ± 272 | 1.6 ± 0.73 |
| R318Y/R338E/E410N/D104N/ | 2 | 502 | 531 | 8.9 | 2008 | 2041 | 355 | 0.49 |
| K106S | | | | | | | | |
| R318Y/R338E/E410N/Y155F | 2 | 555 | 584 | 6.5 | 678 | 721 | 1136 | 1.53 |
| K228N/R318Y/E410N | 1 | 304 | 408 | 6.0 | 686 | 906 | 485 | 1.10 |
| R318Y/R338E/R403E/E410N | 5 | 442 ± 22 | 534 ± 28 | 16.4 ± 3.7 | 3902 ± 867 | 4232 ± 996 | 157 ± 38 | 0.25 ± 0.05 |
| A103N/N105S/R318Y/R338E/ | 2 | 421 | 527 | 16.2 | 3605 | 3935 | 157 | 0.26 |
| R403E/E410N | | | | | | | | |
| D104N/K106S/R318Y/R338E/ | 2 | 417 | 517 | 15.1 | 3114 | 3392 | 183 | 0.30 |
| R403E/E410N | | | | | | | | |
| Y155F/R318Y/R338E/R403E/ | 2 | 565 | 649 | 12.4 | 3687 | 3772 | 226 | 0.27 |
| E410N | | | | | | | | |
| R318Y/R338E/R403E/E410N/ | 3 | 669 ± 145 | 819 ± 223 | 17.2 ± 2.0 | 5844 ± 1064 | 6204 ± 1393 | 156 ± 8.7 | 0.17 ± 0.04 |
| A103N/N105S/Y155F | | | | | | | | |
| R318Y/R338E/R403E/E410N/ | 2 | 472 | 575 | 14.4 | 5885 | 5967 | 114 | 0.17 |
| D104N/K106S/Y155F | | | | | | | | |
| D203N/F205T/R318Y/E410N | 1 | 431 | 475 | 8.0 | 637 | 761 | 816 | 1.31 |
| R338L | 2 | 368 | 377 | 11.2 | 1761 | 1861 | 285 | 0.54 |
| K316M | 2 | 527 | 665 | 7.9 | 1846 | 2142 | 356 | 0.47 |
| E239S | 2 | 462 | 542 | 11.3 | 2184 | 2416 | 278 | 0.41 |
| E239A | 2 | 538 | 544 | 13.1 | 1973 | 2209 | 353 | 0.45 |
| E239R | 2 | 431 | 709 | 8.9 | 1668 | 2020 | 307 | 0.50 |
| E239K | 2 | 400 | 370 | 14.4 | 2107 | 2222 | 278 | 0.48 |
| H257F | 2 | 328 | 357 | 10.3 | 1689 | 1820 | 273 | 0.70 |
| H257Y | 2 | 352 | 353 | 13.6 | 1971 | 2063 | 245 | 0.49 |
| H257E | 2 | 491 | 520 | 10.9 | 2185 | 2411 | 294 | 0.42 |
| H257S | 2 | 435 | 511 | 8.2 | 1630 | 1769 | 358 | 0.57 |
| T412A | 2 | 473 | 539 | 7.1 | 1561 | 1756 | 379 | 0.58 |
| T412V | 2 | 579 | 665 | 8.3 | 1258 | 1454 | 565 | 0.69 |
| E410N/T412A | 2 | 461 | 514 | 2.8 | 364 | 398 | 1679 | 2.51 |
| E410N/T412V | 2 | 340 | 390 | 3.7 | 431 | 487 | 906 | 2.27 |
| E410Q | 2 | 276 | 283 | 7.2 | 445 | 484 | 836 | 2.19 |
| E410S | 2 | 310 | 286 | 7.2 | 753 | 775 | 587 | 1.32 |
| E410A | 2 | 363 | 328 | 8.6 | 528 | 554 | 946 | 1.81 |
| E410D | 2 | 348 | 377 | 9.2 | 1473 | 1596 | 320 | 0.63 |
| N346D | 2 | 349 | 395 | 13.3 | 2817 | 2956 | 170 | 0.34 |
| Y155F/N346D | 2 | 472 | 478 | 17.0 | 3934 | 3986 | 176 | 0.26 |
| N346Y | 2 | 329 | 325 | 11.7 | 1246 | 1297 | 365 | 0.77 |
| Y345T | 2 | 359 | 453 | 6.1 | 1124 | 1200 | 438 | 0.85 |
| T343R | 2 | 402 | 504 | 6.5 | 1143 | 1234 | 487 | 0.85 |
| T343E | 2 | 414 | 461 | 12.6 | 1740 | 1877 | 318 | 0.53 |
| T343Q | 2 | 434 | 442 | 9.0 | 1626 | 1737 | 408 | 0.63 |
| F342I | 2 | 400 | 476 | 8.3 | 1133 | 1224 | 491 | 0.88 |
| T343R/Y345T | 2 | 325 | 324 | 9.1 | 1094 | 1130 | 422 | 0.90 |
| R318Y/R338E | 2 | 340 | 313 | 11.2 | 1402 | 1452 | 336 | 0.69 |
| K228N/I251S | 2 | 586 | 657 | 11.3 | 1473 | 1588 | 551 | 0.65 |
| K228N/R318Y/R338E/R403E/ | 2 | 476 | 647 | 9.1 | 2400 | 2726 | 261 | 0.37 |
| E410N | | | | | | | | |
| K228N/R318Y/R338E/R403E/ | 3 | 615 ± 135 | 750 ± 191 | 18.6 ± 2.1 | 5496 ± 2044 | 5970 ± 2260 | 158 ± 50 | 0.18 ± 0.06 |
| E410N/Y155F | | | | | | | | |
| K228N/R318Y/R338E/R403E/ | 2 | 587 | 713 | 24.8 | 6153 | 6725 | 125 | 0.15 |
| E410N/D85N | | | | | | | | |
| I251S/R318Y/R338E/R403E/ | 3 | 412 ± 140 | 542 ± 181 | 15.7 ± 4.9 | 2306 ± 884 | 2636 ± 1261 | 242 ± 89 | 0.44 ± 0.17 |
| E410N | | | | | | | | |
| D104N/K106S/I251S/R318Y/ | 4 | 687 ± 60 | 874 ± 82 | 17.2 ± 2.2 | 7653 ± 456 | 8127 ± 520 | 122 ± 10 | 0.12 ± 0.01 |
| R338E/R403E/E410N | | | | | | | | |
| I251S/R318Y/R338E/R403E/ | 2 | 492 | 620 | 19.9 | 5704 | 6510 | 110 | 0.15 |
| E410N/Y155F | | | | | | | | |
| I251S/R318Y/R338E/E410N | 2 | 591 | 630 | 7.5 | 1245 | 1292 | 664 | 0.78 |
| D104N/K106S/D104N/K106S/ | 2 | 726 | 819 | 16.4 | 1512 | 1612 | 650 | 0.62 |
| I251S/R318Y/R338E/E410N/ | | | | | | | | |
| K247N/N249S/R318Y/R338E/ | 2 | 637 | 807 | 15.4 | 5283 | 5541 | 170 | 0.18 |
| R403E/E410N | | | | | | | | |
| Y155F/K247N/N249S/R318Y/ | 2 | 613 | 758 | 13.8 | 5335 | 5549 | 160 | 0.18 |
| R338E/R403E/E410N | | | | | | | | |
| A103N/N105S/K247N/N249S/ | 2 | 615 | 783 | 18.6 | 7319 | 7612 | 117 | 0.13 |
| R318Y/R338E/R403E/E410N | | | | | | | | |
| D104N/K106S/K247N/N249S/ | 2 | 626 | 754 | 19.4 | 6332 | 6580 | 140 | 0.15 |
| R318Y/R338E/R403E/E410N | | | | | | | | |
| K228N/N84S/R318Y/R338E/ | 2 | 512 | 539 | 18.1 | 1925 | 1967 | 396 | 0.54 |
| E410N | | | | | | | | |
| Y155F/K228N/N84S/R318Y/ | 2 | 617 | 685 | 8.1 | 1170 | 1221 | 745 | 0.83 |
| R338E/E410N | | | | | | | | |
| R318Y/R338E/R403E/E410S | 2 | 382 | 395 | 14.7 | 2897 | 2971 | 184 | 0.34 |
| R318Y/R338E/E410S | 2 | 356 | 326 | 7.7 | 488 | 511 | 1066 | 2.08 |
| K228N/K247N/N249S | 2 | 662 | 753 | 19.6 | 3390 | 3578 | 268 | 0.28 |
| K228N/K247N/N249S/D104N/ | 3 | 781 ± 55 | 939 ± 48 | 18.5 ± 3.8 | 6111 ± 1900 | 6606 ± 1949 | 183 ± 63 | 0.16 ± 0.04 |
| K106S/Y155F | | | | | | | | |
| K228N/K247N/N249S/D104N/ | 2 | 758 | 838 | 17.9 | 3792 | 4035 | 271 | 0.25 |
| K106S | | | | | | | | |
| K228N/K247N/N249S/Y155F | 2 | 549 | 643 | 17.2 | 3002 | 3269 | 246 | 0.31 |
| I251S/R318Y/R338E/R403E/ | 3 | 599 ± 89 | 753 ± 121 | 21.7 ± 3.2 | 8567 ± 2834 | 9233 ± 2860 | 96.6 ± 15.4 | 0.11 ± 0.03 |
| E410N/Y155F | | | | | | | | |
| R318Y/R338E/R403E/E410N/ | 2 | 424 | 456 | 20.0 | 4730 | 4892 | 124 | 0.20 |
| T412V | | | | | | | | |
| R318Y/R338E/R403E/E410N/ | 2 | 380 | 439 | 17.5 | 4994 | 5115 | 107 | 0.20 |
| T412A | | | | | | | | |
| R318Y/R338E/R403E/T412A | 3 | 399 ± 88 | 477 ± 108 | 19.7 ± 0.7 | 4320 ± 2385 | 4505 ± 2357 | 144 ± 48 | 0.27 ± 0.15 |
| R318Y/R3380E/T412A | 2 | 462 | 401 | 13.6 | 1674 | 1691 | 398 | 0.60 |
| N260S/R318Y/R338E/R403E/ | 2 | 583 | 743 | 23.9 | 6821 | 7488 | 111 | 0.13 |
| E410N | | | | | | | | |
| D104N/K106S/N260S/R318Y/ | 2 | 779 | 999 | 17.2 | 7100 | 7728 | 145 | 0.12 |
| R338E/R403E/E410N | | | | | | | | |
| Y155F/N260S/R318Y/R338E/ | 2 | 628 | 758 | 21.4 | 5214 | 5465 | 167 | 0.21 |
| R403E/E410N | | | | | | | | |
| R318Y/R338E/N346D/R403E/ | 2 | 474 | 575 | 25.2 | 7623 | 8140 | 86 | 0.12 |
| E410N | | | | | | | | |
| Y155F/R318Y/R338E/N346D/ | 2 | 540 | 641 | 18.2 | 5039 | 5172 | 154 | 0.20 |
| R403E/E410N | | | | | | | | |
| K247N/N249S/N260S | 2 | 549 | 632 | 17.4 | 4156 | 4262 | 186 | 0.23 |
| Y155F/K247N/N249S/N260S | 2 | 691 | 814 | 24.0 | 3857 | 4085 | 244 | 0.22 |
| D104N/K106S/K247N/N249S/ | 2 | 712 | 859 | 16.5 | 4187 | 4458 | 235 | 0.23 |
| N260S | | | | | | | | |
| D104N/K106S/Y155F/K247N/ | 2 | 680 | 856 | 23.3 | 7026 | 7423 | 134 | 0.14 |
| N249S/N260S | | | | | | | | |
| K247N/N249S/N260S/R318Y/ | 2 | 691 | 875 | 18.9 | 6353 | 6737 | 149 | 0.13 |
| R338E/R403E/E410N | | | | | | | | |
| R318Y/R338E/T343R/R403E/ | 2 | 531 | 560 | 20.5 | 3766 | 3862 | 200 | 0.27 |
| E410N | | | | | | | | |
| R338E/T343R | 2 | 534 | 453 | 12.8 | 798 | 813 | 949 | 1.23 |

*80% glycosylated form of E410N

TABLE 36
PK properties of FIX variants assessed by ELISA

| Mutation | Mutation | | Terminal | AUC/Dose | AUC/Dose | MRT | | | |
|---|---|---|---|---|---|---|---|---|---|
| (Mature FIX Numbering) | (Chymotrypsin Numbering) | N | T½ | (0-last) | (0-inf) | (0-inf) | Cmax/Dose | Vz | Cl |
| N157D | N[157]D | 2 | 290 | 1166 | 1211 | 265 | 9.9 | 393 | 0.93 |
| Y155F | Y[155]F | 2 | 443 | 3941 | 4375 | 567 | 18.1 | 149 | 0.23 |
| A103N/N105S/Y155F | A[103]N/N[105]S/Y[155]F | 2 | 562 | 2427 | 2496 | 619 | 13.1 | 325 | 0.40 |
| D104N/K106S/Y155F | D[104]N/K[106]S/Y[155]F | 3 | 514 ± 79.8 | 3060 ± 1030 | 3180 ± 989 | 581 ± 81.0 | 13.8 ± 1.02 | 243 ± 47.4 | 0.341 ± 0.128 |
| WT | Catalyst Biosciences WT | 2 | 329 | 2036 | 2121 | 360 | 11.9 | 229 | 0.48 |
| A103N/N105S | A[103]N/N[105]S | 2 | 375 | 2841 | 3068 | 481 | 12.5 | 177 | 0.33 |
| D104N/K106S | D[104]N/K[106]S | 2 | 428 | 3379 | 3786 | 558 | 13.9 | 164 | 0.26 |
| K106N/V108S | K[106]N/V[108]S | 2 | 510 | 2748 | 3202 | 629 | 12.8 | 234 | 0.32 |
| D85N | D[85]N | 4 | 575 ± 89.3 | 1530 ± 321 | 1680 ± 83.3 | 623 ± 83.3 | 9.10 ± 0.518 | 528 ± 184 | 0.619 ± 0.156 |
| T148A | BeneFIX, T[148]A | 3 | 314 ± 128 | 1300 ± 298 | 1520 ± 158 | 366 ± 105 | 9.12 ± 1.52 | 308 ± 160 | 0.662 ± 0.071 |
| T148A | T[148]A | 8 | 383 ± 109 | 1620 ± 195 | 1750 ± 234 | 435 ± 128 | 10.2 ± 2.09 | 317 ± 82.3 | 0.582 ± 0.084 |
| K5A | K[5]A | 2 | 271 | 1548 | 1583 | 311 | 10.5 | 251 | 0.64 |
| D64N | D[64]N | 2 | 447 | 1933 | 2152 | 519 | 11.8 | 304 | 0.47 |
| D64A | D[64]A | 2 | 364 | 1351 | 1466 | 372 | 11.5 | 359 | 0.68 |
| N167D | N[167]D | 2 | 334 | 1129 | 1176 | 318 | 8.9 | 410 | 0.85 |
| N167Q | N[167]Q | 3 | 337 ± 8.75 | 1500 ± 258 | 1550 ± 268 | 323 ± 4.25 | 8.20 ± 1.17 | 318 ± 42.5 | 0.655 ± 0.103 |
| S61A | S[61]A | 2 | 397 | 1685 | 1800 | 412 | 10.0 | 325 | 0.57 |
| S53A | S[53]A | 2 | 382 | 2146 | 2321 | 462 | 11.2 | 238 | 0.43 |
| T159A | T[159]A | 2 | 232 | 1036 | 1048 | 227 | 10.5 | 315 | 0.97 |
| T169A | T[169]A | 2 | 348 | 836 | 889 | 319 | 8.3 | 567 | 1.15 |
| T172A | T[172]A | 3 | 494 ± 187 | 2050 ± 408 | 237 ± 676 | 571 ± 214 | 11.2 ± 2.89 | 295 ± 31.5 | 0.447 ± 0.132 |
| T179A | T[179]A | 2 | 377 | 2291 | 2458 | 431 | 12.5 | 223 | 0.42 |
| Y155H | Y[155]H | 2 | 465 | 2365 | 2638 | 552 | 11.6 | 253 | 0.38 |
| Y155Q | Y[155]Q | 1 | 552 | 2583 | 3045 | 645 | 13.6 | 262 | 0.33 |
| S158E | S[158]E | 2 | 433 | 2029 | 2222 | 471 | 14.5 | 291 | 0.46 |
| N157Q | N[157]Q | 2 | 335 | 1185 | 1238 | 352 | 11.3 | 395 | 0.83 |
| D203N/F205T | D39N/F41T | 3 | 481 ± 69.0 | 2030 ± 448 | 2290 ± 489 | 566 ± 28.6 | 9.43 ± 1.93 | 314 ± 91.3 | 0.449 ± 0.087 |
| D85N/D203N/F205T | D[85]N/D39N/F41T | 1 | 291 | 1538 | 2044 | 406 | 12.4 | 205 | 0.49 |
| K228N | K63N | 3 | 490 ± 57.8 | 2340 ± 519 | 2570 ± 682 | 570 ± 27.9 | 12.3 ± 1.58 | 296 ± 119 | 0.410 ± 0.118 |
| A103N/N105S/K228N | A[103]N/N[105]S/K63N | 2 | 583 | 3032 | 3301 | 701 | 14.4 | 255 | 0.30 |
| D104N/K106S/K228N | D[104]N/K[106]S/K63N | 2 | 801 | 2050 | 2238 | 913 | 13.6 | 513 | 0.45 |
| Y155F/K228N | Y[155]F/K63N | 2 | 626 | 2073 | 2149 | 679 | 8.6 | 431 | 0.47 |
| D104N/K106S/Y155F/K228N | D[104]N/K[106]S/Y[155]F/K63N | 2 | 551 | 3730 | 3822 | 614 | 14.0 | 211 | 0.27 |
| I251S | I86S | 2 | 565 | 2646 | 3137 | 718 | 10.1 | 260 | 0.32 |
| A103N/N105S/I251S | A[103]N/N[105]S/I86S | 2 | 444 | 2445 | 2719 | 542 | 14.3 | 241 | 0.38 |
| D104N/K106S/I251S | D[104]N/K[106]S/I86S | 2 | 692 | 2533 | 2664 | 802 | 13.9 | 375 | 0.38 |
| Y155F/I251S | Y[155]F/I86S | 2 | 572 | 2591 | 2790 | 660 | 12.2 | 291 | 0.37 |
| A262S | A95bS | 2 | 373 | 2716 | 2926 | 453 | 14.4 | 188 | 0.36 |
| E410N | E240N | 2 | 439 | 893 | 1365 | 551 | 7.4 | 469 | 0.75 |
| E239N | E74N | 2 | 338 | 1657 | 1908 | 416 | 10.7 | 257 | 0.54 |
| K247N/N249S | K82N/N84S | 6 | 627 ± 174 | 2200 ± 737 | 2540 ± 795 | 734 ± 244 | 10.8 ± 3.41 | 387 ± 154 | 0.420 ± 0.106 |
| Y155F/K247N/N249S | Y[155]F/K82N/N84S | 2 | 538 | 1752 | 1880 | 608 | 10.6 | 420 | 0.53 |
| A103N/N105S/K247N/N249S | A[103]N/N[105]S/K82N/N84S | 2 | 736 | 4369 | 4699 | 852 | 21.5 | 226 | 0.21 |
| D104N/K106S/K247N/N249S | D[104]N/K[106]S/K82N/N84S | 2 | 571 | 2052 | 2109 | 632 | 16.2 | 426 | 0.51 |
| D104N/K106S/Y155F/K247N/N249S | D[104]N/K[106]S/Y[155]F/K82N/N84S | 2 | 603 | 3744 | 3889 | 714 | 16.8 | 233 | 0.27 |
| S319N/L321S | S151N/L153S | 2 | 351 | 2270 | 2409 | 427 | 11.4 | 210 | 0.42 |
| N260S | N95S | 3 | 496 ± 157 | 3360 ± 1300 | 3690 ± 1460 | 619 ± 170 | 11.5 ± 3.18 | 231 ± 156 | 0.295 ± 0.105 |
| D104N/K106S/N260S | D[104]N/K[106]S/N95S | 2 | 805 | 4736 | 5248 | 1001 | 16.1 | 220 | 0.20 |
| Y155F/N260S | Y[155]F/N95S | 2 | 607 | 3408 | 3530 | 682 | 18.4 | 257 | 0.27 |
| Y284N | Y117N | 2 | 400 | 2052 | 2210 | 478 | 9.0 | 270 | 0.46 |
| R318Y/E410N | R150Y/E240N | 1 | 428 | 575 | 686 | 474 | 6.1 | 900 | 1.46 |
| R338E/E410N | R170E/E240N | 2 | 334 | 718 | 844 | 376 | 6.2 | 570 | 1.18 |
| R338E/R403E/E410N | R170E/R233E/E240N | 5 | 436 ± 24.4 | 3050 ± 522 | 3300 ± 656 | 507 ± 28.9 | 13.4 ± 2.03 | 196 ± 49.2 | 0.312 ± 0.063 |
| D203N/F205T/E410N | D39N/F41T/E240N | 2 | 600 | 671 | 799 | 679 | 6.8 | 1080 | 1.25 |
| D203N/F205T/R338E | D39N/F41T/R170E | 2 | 307 | 1186 | 1586 | 419 | 9.3 | 281 | 0.63 |
| D203N/F205T/R338A | D39N/F41T/R170A | 2 | 317 | 1063 | 1397 | 403 | 9.0 | 327 | 0.72 |
| D203N/F205T/R318Y | D39N/F41T/R150Y | 2 | 258 | 508 | 601 | 286 | 8.7 | 732 | 1.91 |
| D203N/F205T/R338E/R403E | D39N/F41T/R170E/R233E | 2 | 303 | 2105 | 2804 | 419 | 11.3 | 156 | 0.36 |
| K228N/E410N | K63N/E240N | 2 | 373 | 721 | 1025 | 479 | 6.0 | 522 | 0.98 |
| K228N/R338E | K63N/R170E | 2 | 248 | 1403 | 1736 | 340 | 10.4 | 207 | 0.58 |
| R318Y/R338E/E410N | R150Y/E240N/R170E | 5 | 424 ± 306 | 645 ± 310 | 774 ± 454 | 515 ± 378 | 5.78 ± 1.56 | 778 ± 272 | 1.62 ± 0.730 |
| D104N/K106S/R318Y/R338E/E410N | D[104]N/K[106]S/R150Y/R170E/E240N/ | 2 | 502 | 2008 | 2041 | 531 | 8.9 | 355 | 0.49 |
| Y155F/R318Y/R338E/E410N | Y[155]F/R150Y/R170E/E240N | 2 | 555 | 678 | 721 | 584 | 6.5 | 1136 | 1.53 |
| K228N/R318Y/E410N | K63N/R150Y/E240N | 1 | 304 | 686 | 906 | 408 | 6.0 | 485 | 1.10 |
| R318Y/R338E/R403E/E410N | R150Y/R170E/R233E/E240N | 5 | 442 ± 22.1 | 3900 ± 867 | 4230 ± 996 | 534 ± 28.0 | 16.4 ± 3.72 | 157 ± 38.3 | 0.246 ± 0.051 |
| A103N/N105S/R318Y/R338E/R403E/ | A[103]N/N[105]S/R150Y/R170E/R233E/ | 2 | 421 | 3605 | 3935 | 527 | 16.2 | 157 | 0.26 |
| E410N | E240N | | | | | | | | |
| D104N/K106S/R318Y/R338E/R403E/ | D[104]N/K[106]S/R150Y/R170E/R233E/ | 2 | 417 | 3114 | 3392 | 517 | 15.1 | 183 | 0.30 |
| E410N | E240N | | | | | | | | |
| Y155F/R318Y/R338E/R403E/E410N | Y[155]F/R150Y/R170E/R233E/E240N | 2 | 565 | 3687 | 3772 | 649 | 12.4 | 226 | 0.27 |
| A103N/N105S/Y155F/R318Y/R338E/ | A[103]N/N[105]S/Y[155]F/ | 3 | 669 ± 145 | 5840 ± 1060 | 6200 ± 1390 | 819 ± 223 | 17.2 ± 2.02 | 156 ± 8.74 | 0.167 ± 0.039 |
| R403E/E410N | R150Y/R170E/R233E/E240N | | | | | | | | |
| D104N/K106S/Y155F/R318Y/R338E/ | D[104]N/K[106]S/Y[155]F/ | 2 | 472 | 5885 | 5967 | 575 | 14.4 | 114 | 0.17 |
| R403E/E410N | R150Y/R170E/R233E/E240N | | | | | | | | |
| D203N/F205T/R318Y/E410N | D39N/F41T/R150Y/E240N | 1 | 431 | 637 | 761 | 475 | 8.0 | 816 | 1.31 |
| R338L | R170L | 2 | 368 | 1761 | 1861 | 377 | 11.2 | 285 | 0.54 |
| K316M | K148M | 2 | 527 | 1846 | 2142 | 665 | 7.9 | 356 | 0.47 |
| E239S | E74S | 2 | 462 | 2184 | 2416 | 542 | 11.3 | 278 | 0.41 |
| E239A | E74A | 2 | 538 | 1973 | 2209 | 544 | 13.1 | 353 | 0.45 |
| E239R | E74R | 2 | 431 | 1668 | 2020 | 709 | 8.9 | 307 | 0.50 |
| E239K | E74K | 2 | 400 | 2107 | 2222 | 370 | 14.4 | 278 | 0.48 |
| H257F | H92F | 2 | 328 | 1689 | 1820 | 357 | 10.3 | 273 | 0.70 |
| H257Y | H92Y | 2 | 352 | 1971 | 2063 | 353 | 13.6 | 245 | 0.49 |
| H257E | H92E | 2 | 491 | 2185 | 2411 | 520 | 10.9 | 294 | 0.42 |
| H257S | H92S | 2 | 435 | 1630 | 1769 | 511 | 8.2 | 358 | 0.57 |
| T412A | T242A | 2 | 473 | 1561 | 1756 | 539 | 7.1 | 379 | 0.58 |
| T412V | T242V | 2 | 579 | 1258 | 1454 | 665 | 8.3 | 565 | 0.69 |
| E410N/T412A | E240N/T242A | 2 | 461 | 364 | 398 | 514 | 2.8 | 1679 | 2.51 |
| E410N/T412V | E240N/T242V | 2 | 340 | 431 | 487 | 390 | 3.7 | 906 | 2.27 |
| E410Q | E240Q | 2 | 276 | 445 | 484 | 283 | 7.2 | 836 | 2.19 |
| E410S | E240S | 2 | 310 | 753 | 775 | 286 | 7.2 | 587 | 1.32 |
| E410A | E240A | 2 | 363 | 528 | 554 | 328 | 8.6 | 946 | 1.81 |
| E410D | E240D | 2 | 348 | 1473 | 1596 | 377 | 9.2 | 320 | 0.63 |
| N346D | N178D | 2 | 349 | 2817 | 2956 | 395 | 13.3 | 170 | 0.34 |
| Y155F/N346D | 178D/Y[155]F | 2 | 472 | 3934 | 3986 | 478 | 17.0 | 176 | 0.26 |
| N346Y | N178Y | 2 | 329 | 1246 | 1297 | 325 | 11.7 | 365 | 0.77 |
| Y345T | Y177T | 2 | 359 | 1124 | 1200 | 453 | 6.1 | 438 | 0.85 |
| T343R | Y175R | 2 | 402 | 1143 | 1234 | 504 | 6.5 | 487 | 0.85 |
| T343E | T175E | 2 | 414 | 1740 | 1877 | 461 | 12.6 | 318 | 0.53 |
| T343Q | Y175Q | 2 | 434 | 1626 | 1737 | 442 | 9.0 | 408 | 0.63 |
| F342I | F174I | 2 | 400 | 1133 | 1224 | 476 | 8.3 | 491 | 0.88 |
| T343R/Y345T | T175R/Y177T | 2 | 325 | 1094 | 1130 | 324 | 9.1 | 422 | 0.90 |
| R318Y/R338E | R150Y/R170E | 2 | 340 | 1402 | 1452 | 313 | 11.2 | 336 | 0.69 |
| K228N/I251S | K63N/I86S | 2 | 586 | 1473 | 1588 | 657 | 11.3 | 551 | 0.65 |
| K228N/R318Y/R338E/R403E/E410N | K63N/R150Y/R170E/R233E/E240N | 2 | 476 | 2400 | 2726 | 647 | 9.1 | 261 | 0.37 |
| Y155F/K228N/R318Y/R338E/R403E/ | Y[155]F/K63N/R150Y/R170E/R233E/E240N | 3 | 615 ± 135 | 5500 ± 2040 | 5970 ± 2260 | 750 ± 191 | 18.6 ± 2.14 | 158 ± 50.1 | 0.183 ± 0.062 |
| E410N | | | | | | | | | |
| D85N/K228N/R318Y/R338E/R403E/ | D[85]N/K63N/R150Y/R170E/R233E/E240N | 2 | 587 | 6153 | 6725 | 713 | 24.8 | 125 | 0.15 |
| E410N | | | | | | | | | |
| I251S/R318Y/R338E/R403E/E410N | I86S/R150Y/R170E/R233E/E240N | 3 | 412 ± 140 | 2310 ± 884 | 2640 ± 1260 | 542 ± 181 | 15.7 ± 4.89 | 242 ± 89.4 | 0.438 ± 0.171 |
| D104N/K106S/I251S/R318Y/R338E/ | D[104]N/K[106]S/I86S/R150Y/ | 4 | 687 ± 60.2 | 7650 ± 456 | 8130 ± 520 | 874 ± 81.7 | 17.2 ± 2.24 | 122 ± 10.1 | 0.123 ± 0.008 |
| R403E/E410N | R170E/R233E/E240N | | | | | | | | |
| Y155F/I251S/R318Y/R338E/R403E/ | Y[155]F/I86S/R150Y/R170E/R233E/E240N | 2 | 492 | 5704 | 6510 | 620 | 19.9 | 110 | 0.15 |
| E410N | | | | | | | | | |
| I251S/R318Y/R338E/E410N | I86S/R150Y/R170E/E240N | 2 | 591 | 1245 | 1292 | 630 | 7.5 | 664 | 0.78 |
| D104N/K106S/I251S/R318Y/R338E/ | D[104]N/K[106]S I86S/R150Y/ | 2 | 726 | 1512 | 1612 | 819 | 16.4 | 650 | 0.62 |
| E410N | R170E/E240N | | | | | | | | |
| K247N/N249S/R318Y/R338E/R403E/ | K82N/N84S/R150Y/R170E/R233E/E240N | 2 | 637 | 5283 | 5541 | 807 | 15.4 | 170 | 0.18 |
| E410N | | | | | | | | | |
| Y155F/K247N/N249S/R318Y/R338E/ | Y[155]F/K82N/N84S/R150Y/R170E/R233E/ | 2 | 613 | 5335 | 5549 | 758 | 13.8 | 160 | 0.18 |
| R403E/E410N | E240N | | | | | | | | |
| A103N/N105S/K247N/N249S/R318Y/ | A[103]N/N[105]S K82N/N84S/ | 2 | 615 | 7319 | 7612 | 783 | 18.6 | 117 | 0.13 |
| R338E/R403E/E410N | R150Y/R170E/R233E/E240N/ | | | | | | | | |
| D104N/K106S/K247N/N249S/R318Y/ | D[104]N/K[106]S K82N/N84S/ | 2 | 626 | 6332 | 6580 | 754 | 19.4 | 140 | 0.15 |
| R338E/R403E/E410N | R150Y/R170E/R233E/E240N/ | | | | | | | | |
| D104N/K106S/Y155F/K247N/N249S/ | D[104]N/K[106]S/Y[155]F/ | 2 | 846 | 8069 | 8807 | 1020 | 18.4 | 139 | 0.11 |
| R318Y/R338E/R403E/E410N | K82N/N84S/R150Y/R170E/R233E/E240N | | | | | | | | |
| K247N/N249S/R318Y/R338E/E410N | K82N/N84S/R150Y/R170E/E240N | 2 | 512 | 1925 | 1967 | 539 | 18.1 | 396 | 0.54 |
| Y155F/K247N/N249S/R318Y/R338E/ | Y[155]F/K82N/N84S/R150Y/R170E/E240N/ | 2 | 617 | 1170 | 1221 | 685 | 8.1 | 745 | 0.83 |
| E410N | | | | | | | | | |
| R318Y/R338E/R403E/E410S | R150Y/R170E/R233E/E240S | 2 | 382 | 2897 | 2971 | 395 | 14.7 | 184 | 0.34 |
| R318Y/R338E/E410S | R150Y/R170E/E240S | 2 | 356 | 488 | 511 | 326 | 7.7 | 1066 | 2.08 |
| K228N/K247N/N249S | K63N/K82N/N84S | 2 | 662 | 3390 | 3578 | 753 | 19.6 | 268 | 0.28 |
| D104N/K106S/Y155F/K228N/K247N/ | D[104]N/K[106]S/Y[155]F/ | 3 | 781 ± 55.2 | 6110 ± 1900 | 6610 ± 1950 | 939 ± 48.2 | 18.5 ± 3.84 | 183 ± 63.3 | 0.160 ± 0.045 |
| N249S | K63N/K82N/N84S | | | | | | | | |
| D104N/K106S/K228N/K247N/N249S | D[104]N/K[106]S/K63N/K82N/N84S | 2 | 758 | 3792 | 4035 | 838 | 17.9 | 271 | 0.25 |
| Y155F/K228N/K247N/N249S | Y[155]F/K63N/K82N/N84S | 2 | 549 | 3002 | 3269 | 643 | 17.2 | 246 | 0.31 |
| K228N/K247N/N249S/R318Y/R338E/ | Y[155]F/I86S/R150Y/R170E/R233E/E240N/ | 3 | 599 ± 88.6 | 8570 ± 2830 | 9230 ± 2860 | 753 ± 120 | 21.7 ± 3.19 | 96.6 ± 15.4 | 0.115 ± 0.030 |
| R403E/E410N | | | | | | | | | |
| D104N/K106S/K228N/K247N/N249S/ | D[104]N/K[106]S/K63N/K82N/N84S/ | 3 | 806 ± 88.6 | 9330 ± 2830 | 9990 ± 2860 | 912 ± 120 | 24.4 ± 3.19 | 116 ± 15.4 | 0.100 ± 0.030 |
| R318Y/R338E/R403E/E410N | R150Y/R170E/R233E/E240N | | | | | | | | |
| Y155F/K228N/K247N/N249S/R318Y/ | Y[155]F/K63N/K82N/N84S/R150Y/R170E/ | 1 | 559 | 10704 | 11042 | 710 | 27.3 | 73 | 0.09 |
| R338E/R403E/E410N | R233E/E240N | | | | | | | | |
| R318Y/R338E/R403E/E410N/T412V | R150Y/R170E/R233E/E240N/T242V | 2 | 424 | 4730 | 4892 | 456 | 20.0 | 124 | 0.20 |
| R318Y/R338E/R403E/E410N/T412A | R150Y/R170E/R233E/E240N/T242A | 2 | 380 | 4994 | 5115 | 439 | 17.5 | 107 | 0.20 |
| R318Y/R338E/R403E/T412A | R150Y/R170E/R233E/T242A | 3 | 399 ± 88.1 | 4320 ± 2380 | 4500 ± 2360 | 477 ± 108 | 19.7 ± 0.684 | 144 ± 47.8 | 0.270 ± 0.145 |
| R318Y/R338E/T412A | R150Y/R170E/T242A | 2 | 462 | 1674 | 1691 | 401 | 13.6 | 398 | 0.60 |
| R318Y/R338E/E410N/T412V | 150Y/R170E/E240N/T242V | 2 | 251 | 524 | 555 | 226 | 16.3 | 772 | 2.31 |
| N260S/R318Y/R338E/R403E/E410N | N95S/R150Y/R170E/R233E/E240N | 2 | 583 | 6821 | 7488 | 743 | 23.9 | 111 | 0.13 |
| D104N/K106S/N260S/R318Y/R338E/ | D[104]N/K[106]S/N95S/R150Y/ | 2 | 779 | 7100 | 7728 | 999 | 17.2 | 145 | 0.12 |
| R403E/E410N | R170E/R233E/E240N | | | | | | | | |
| Y155F/N260S/R318Y/R338E/R403E/ | Y[155]F/N95S/R150Y/R170E/R233E/E240N | 2 | 628 | 5214 | 5465 | 758 | 21.4 | 167 | 0.21 |
| E410N | | | | | | | | | |
| R318Y/R338E/N346D/R403E/E410N | R150Y/R170E/N178D/R233E/E240N | 2 | 474 | 7623 | 8140 | 575 | 25.2 | 86 | 0.12 |
| Y155F/R318Y/R338E/N346D/R403E/ | Y[155]F/R150Y/R170E/N178D/R233E/E240N | 2 | 540 | 5039 | 5172 | 641 | 18.2 | 154 | 0.20 |
| E410N | | | | | | | | | |
| K247N/N249S/N260S | K82N/N84S/N95S | 2 | 549 | 4156 | 4262 | 632 | 17.4 | 186 | 0.23 |
| Y155F/K247N/N249S/N260S | Y[155]F/K82N/N84S/N95S | 2 | 691 | 3857 | 4085 | 814 | 24.0 | 244 | 0.22 |
| D104N/K106S/K247N/N249S/N260S | D[104]N/K[106]S/K82N/N84S/N95S | 2 | 712 | 4187 | 4458 | 859 | 16.5 | 235 | 0.23 |
| D104N/K106S/Y155F/K247N/N249S/ | D[104]N/K[106]S/Y[155]F/ | 2 | 680 | 7026 | 7423 | 856 | 23.3 | 134 | 0.14 |
| N260S | K82N N84S/N95S/ | | | | | | | | |
| K247N/N249S/N260S/R318Y/R338E/ | K82N/N84S/N95S/R150Y/R170E/R233E/E240N | 2 | 691 | 6353 | 6737 | 875 | 18.9 | 149 | 0.13 |
| R403E/E410N | | | | | | | | | |
| Y155F/K247N/N249S/N260S/R318Y/ | Y[155]F/K82N/N84S/N95S/R150Y/R170E/ | 1 | 1038 | 8401 | 9376 | 1068 | 21.0 | 160 | 0.11 |
| R338E/R403E/E410N | R233E/E240N | | | | | | | | |
| R318Y/R338E/T343R/R403E/E410N | T175R/R233E/E240N/R150Y/R170E | 2 | 531 | 3766 | 3862 | 560 | 20.5 | 200 | 0.27 |
| Y155F/R318Y/R338E/T343R/R403E/ | Y[155]F/R150Y/R170E/T175R/R233E/E240N | 1 | 182 | 3223 | 4335 | 259 | 20.5 | 61 | 0.23 |
| E410N | | | | | | | | | |
| D104N/K106S/R318Y/R338E/T343R/ | D[104]N/K[106]S/R150Y/R170E/ | 3 | 666 ± 89.9 | 7270 ± 729 | 7550 ± 708 | 699 ± 88.0 | 21.7 ± 4.71 | 128 ± 21.1 | 0.133 ± 0.013 |
| R403E/E410N | T175R/R233E/E240N | | | | | | | | |
| R338E/T343R | R170E/T175R | 2 | 534 | 798 | 813 | 453 | 12.8 | 949 | 1.23 |
| T343R/N346Y | T175R/N178Y | 3 | 276 ± 19.9 | 1080 ± 331 | 1100 ± 333 | 228 ± 7.76 | 12.3 ± 5.14 | 394 ± 156 | 0.989 ± 0.360 |
| R318Y/R338E/N346Y/R403E/E410N | R150Y/R170E/N178Y/R233E/E240N | 2 | 324 | 2394 | 2487 | 335 | 24.7 | 189 | 0.40 |
| R318Y/R338E/T343R/N346Y/R403E/ | R150Y/R170E/T175R/N178Y/R233E/E240N | 2 | 303 | 3569 | 3691 | 329 | 22.2 | 118 | 0.27 |
| E410N | | | | | | | | | |
| T343R/N346D | T175R/N178D | 2 | 388 | 2903 | 2917 | 356 | 17.0 | 192 | 0.34 |
| R318Y/R338E/T343R/N346D/R403E/ | R150Y/R170E/T175R/N178D/R233E/E240N | 2 | 450 | 6645 | 6717 | 506 | 20.7 | 97 | 0.15 |
| E410N | | | | | | | | | |
| R318Y/R338E/Y345A/R403E/E410N | R150Y/R170E/Y177A/R233E/E240N | 1 | 475 | 4989 | 5058 | 511 | 22.3 | 135 | 0.20 |
| R318Y/R338E/Y345A/N346D/R403E/ | R150Y/R170E/Y177A/N178D/R233E/E240N | 2 | 492 | 6249 | 6347 | 607 | 22.1 | 112 | 0.16 |
| E410N | | | | | | | | | |
| Y155F/K247N/N249S/R318Y/R338E/ | Y[155]F/K82N/N84S/R150Y/R170E/R233E | 2 | 622 | 10477 | 10973 | 791 | 26.9 | 85 | 0.10 |
| R403E | | | | | | | | | |
| K247N/N249S/R318Y/R338E/R403E | K82N/N84S/R150Y/R170E/R233E | 2 | 805 | 8099 | 8569 | 814 | 20.0 | 137 | 0.12 |
| Y155F/K247N/N249S/R338E/R403E/ | Y[155]F/K82N/N84S/R170E/R233E/E240N | 2 | 618 | 9233 | 9709 | 801 | 22.4 | 92 | 0.10 |
| E410N | | | | | | | | | |
| R318Y/R338E/T343R/R403E | R150Y/R170E/T175R/R233E | 2 | 421 | 6107 | 6153 | 473 | 19.9 | 99 | 0.16 |
| R318Y/R338E/T343R/E410N | R150Y/R170E/T175R/E240N | 2 | 529 | 793 | 815 | 391 | 5.6 | 931 | 1.23 |
| R150Y/T343R/R403E/E410N | R150Y/T175R/R233E/E240N | 2 | 431 | 5020 | 5060 | 434 | 20.7 | 130 | 0.21 |
| R170E/T343R/R403E/E410N | R170E/T175R/R233E/E240N | 2 | 484 | 5008 | 5060 | 450 | 19.8 | 141 | 0.20 |
| Y155F/R338E/T343R/R403E/E410N | Y[155]F/R170E/T175R/R233E/E240N | 2 | 628 | 5406 | 5509 | 521 | 17.9 | 164 | 0.18 |
| Y155F/K247N/N249S/R318Y/R338E/ | K82N/N84S/R150Y/R170E/T175R/R233E/E240N | 2 | 513 | 9067 | 9267 | 642 | 24.7 | 82 | 0.11 |
| T343R/R403E/E410N | | | | | | | | | |
| K247N/N249S/R318Y/R338E/T343R/ | K82N/N84S/R150Y/R170E/T175R/R233E/E240N | 2 | 536 | 8604 | 8824 | 672 | 24.4 | 89 | 0.12 |
| R403E/E410N | | | | | | | | | |
| Y155F/K228N/I251S/R318Y/R338E/ | Y[155]F/K63N/I86S/R150Y/R170E/ | 2 | 780 | 9033 | 9557 | 854 | 20.5 | 123 | 0.11 |
| R403E/E410N | R233E/E240N | | | | | | | | |
| N260S/R318Y/R338E/T343R/R403E/ | Y[155]F/N95S/R150Y/R170E/T175R/ | 2 | 539 | 8325 | 8537 | 675 | 24.0 | 92 | 0.12 |
| E410N | R233E/E240N | | | | | | | | |
| Y155F/N260S/R318Y/R338E/T343R/ | Y[155]F/N95S/R150Y/R170E/T175R/ | 1 | 578 | 3266 | 6295 | 733 | 20.4 | 133 | 0.16 |
| R403E/E410N | R233E/E240N | | | | | | | | |
| K228N/K247N/N249S/R318Y/R338E/ | K63N/K82N/N84S/R150Y/R170E/T175R/R233E/ | 2 | 753 | 8972 | 9391 | 757 | 26.0 | 117 | 0.11 |
| T343R/R403E/E410N | E240N | | | | | | | | |
| Y155F/R338E/T343R/R403E | Y[155]F/R170E/T175R/R233E | 2 | 503 | 5350 | 5412 | 506 | 16.7 | 135 | 0.19 |
| Y155F/R338E/T343R/R403E/E410S | Y[155]F/R170E/T175R/R233E/E240S | 2 | 589 | 5447 | 5546 | 526 | 22.9 | 156 | 0.18 |
| Y155F/N260S/R338E/T343R/R403E | Y[155]F/N95S/R170E/T175R/R233E | 2 | 485 | 9590 | 9749 | 619 | 24.0 | 74 | 0.10 |
| Y155F/I251S/R338E/T343R/R403E | Y[155]F/I86S/R170E/T175R/R233E | 2 | 732 | 7531 | 7926 | 807 | 21.0 | 134 | 0.13 |
| R318Y/R338E/T343R/R403E/E410S | R150Y/R170E/T175R/R233E/E240S | 2 | 618 | 4657 | 4728 | 466 | 19.9 | 199 | 0.23 |
| Y155F/K247N/N249S/T343R/R403E | Y[155]F/K82N/N84S/T175R/R233E | 2 | 866 | 7007 | 7391 | 751 | 18.3 | 169 | 0.14 |
| K247N/N249S/R338E/T343R/R403E/ | K82N/N84S/R170E/T175R/R233E/E240N | 2 | 804 | 9554 | 10051 | 776 | 20.4 | 116 | 0.10 |
| E410N | | | | | | | | | |
| Y155F/K247N/N249S/R318Y/R338E | Y[155]F/K82N/N84S/R150Y/R170E | 2 | 662 | 2965 | 3048 | 578 | 13.6 | 313 | 0.33 |
| Y155F/K247N/N249S/R338E/R403E | Y[155]F/K82N/N84S/R170E/R233E | 1 | 717 | 8404 | 8790 | 783 | 16.9 | 118 | 0.11 |
| Y155F/K247N/N249S/R338E/T343R/ | Y[155]F/K82N/N84S/R170E/T175R/ | 2 | 676 | 7455 | 7702 | 676 | 20.3 | 131 | 0.13 |
| R403E | R233E | | | | | | | | |
| K247N/N249S/T343R/R403E/E410N | K82N/N84S/T175R/R233E/E240N | 2 | 680 | 7758 | 8085 | 747 | 18.0 | 122 | 0.13 |

### Example 7

### In vivo assessment of FIX polypeptide procoagulant activity

[0612] Mouse models of hemophilia B, using mice deficient in FIX (FIX^{-/-} mice), were established to assess the procoagulant activity of FIX polypeptides. The mice were treated with FIX polypeptide and the amount of blood lost in 20 minutes was measured to determine the procoagulant activity of the FIX polypeptides.

### A. In Vivo Assessment of Wild-Type FIX Procoagulant Activity

[0613] Male FIX^{-/-} mice were anesthetized by intraperitoneal administration of a ketamine/xylazine cocktail (45 mg/ml and 3.6 mg/ml in saline) and placed on a heated platform (39° C.) to ensure there was no drop in body temperature. The procedure room was kept at a temperature of 82° F. Ten minutes prior to tail cut the tail was immersed in 10 mL of pre-warmed PBS (15 mL centrifuge tube; 39° C.). Seven to fifteen mice were injected with recombinant human FIX (Benefix® Coagulation Factor IX (Recombinant), Wyeth) or modified FIX polypeptides diluted in a buffer that was the same as that of Benefix® Coagulation Factor IX (Recombinant) (0.234% sodium chloride, 8 mM L-histidine, 0.8% sucrose, 208 mM glycine, 0.004% polysorbate 80) via the tail vein in a single injection. A negative control group of mice received buffer only. In instances where the injection was missed, the animal was excluded from the study.

[0614] Injection with FIX polypeptide or buffer was made 5 minutes prior to tail cut. The tail cut was made using a razor blade 5 mm from the end of the tail and blood was collected into PBS for a period of 20 minutes. At the end of the collection period, total blood loss was assessed. The collection tubes were mixed and a 1 ml aliquot of each sample was taken and assayed for hemoglobin content. Triton X-100 was diluted 1 in 4 in sterile water and 100 μL was added to the 1 mL samples to cause hemolysis. The absorbance of the samples was then measured at a wavelength of 546 nm. To calculate the amount of blood lost, the absorbance was read against a standard curve generated by measuring the absorbance at 546 nm of known volumes of murine blood, diluted in PBS and hemolyzed as above with Triton X 100. Values are expressed as Mean±SEM.

[0615] 1. Dose Response Study Assessing Wild-Type FIX Coagulant Activity

[0616] Dose response studies to assess the coagulant activity of Benefix® Coagulation Factor IX (Recombinant) at 0.03, 0.1, 0.3 and 1 mg/kg in FIX^{-/-} mice were performed. In this experiment, the blood loss in the buffer-only group was 835.42±24.55 μl, which was significantly reduced by Benefix® Coagulation Factor IX (Recombinant) treatment at 0.1, 0.3 and 1 mg/kg (to 558.59±56.63 415.81±66.72 μL and 270.75±57.48 p<0.05 using Kruskal-Wallis followed by Dunn's post test). At the lowest dose tested of 0.03 mg/kg the value was 731.66±59.16 μL. Calculated ED₅₀ values using non-linear regression are shown in Table 37 below.

[0617] 2. Dose Response Assessing the Coagulant Activity of FIXa-R318Y/R338E/R403E/E410N, FIXa-R318Y/R338E/E410N and FIXa-Y155F/K247N/N249S/R318Y/R338E/R403E/E410N

[0618] Dose response studies were conducted in which the coagulant activity of FIXa-R318Y/R338E/R403E/E410N (R150Y/R170E/R233E/E240N by chymotrypsin numbering), FIXa-R318Y/R338E/E410N (R150Y/R170E/E240N by chymotrypsin numbering) and FIXa-Y155F/K247N/N249S/R318Y/R338E/R403E/E410N (Y[155]F/K82N/N84S/R150Y/R170E/R233E/E240N by chymotrypsin numbering) at different doses were assessed.

[0619] Treatment with FIXa-R318Y/R338E/R403E/E410N resulted in significant inhibition of blood loss at 0.01, 0.03, 0.1, 0.3 and 1 mg/kg (434.65±73.75 497.28±50.92 230.81±39.67 261.94±58.79 μL and 251.56±41.81 respectively) compared to the buffer-only control (811.45±26.63 μL; p<0.05 using Kruskal-Wallis followed by Dunn's post test). Reducing the dose to 0.003 mg/kg led to blood loss values nearer control levels, of 786.83±44.39 μL.

[0620] Treatment with FIXa-R318Y/R338E/E410N also resulted in significant inhibition of blood loss at 0.03, 0.1, 0.3 and 1 mg/kg (571.67±50.45 425.42±43.65 263.47±42.66 μL and 78.19±13.42 respectively) compared to the buffer-only control (845.14±23.63 μL; p<0.05 using Kruskal-Wallis followed by Dunn's post test). Reducing the dose to 0.001 mg/kg led to blood loss values nearer control levels, of 777.16±53.72 μL.

[0621] Treatment with FIXa-Y155F/K247N/N249S/R318Y/R338E/R403E/E410N resulted in the most significant inhibition of blood loss of the mutants tested: 460.03±74.60 393.48±75.16 μL and 157.28±28.89 μL at 0.01, 0.03 and 0.1 mg/kg, respectively, compared to the buffer-only control (851.38±44.25 p<0.05 using Kruskal-Wallis followed by Dunn's post test). Calculated ED₅₀ values using non-linear regression are shown in Table 37 below.

TABLE 37

| Mutation | Mutation | | | Blood Loss; |
|---|---|---|---|---|
| (Mature FIX | (chymotrypsin | | n | ED50 |
| numbering) | numbering | n/group | (expts) | (mg/kg) |
| BeneFIX ® Coagulation | BeneFIX ® Coagulation | 7-20 | 2 | 0.2 |
| FIX (T148A) | FIX (T[148]A) | | | |
| R318Y/R338E/R403E/ | R150Y/R170E/R233E/ | 19-38 | 3 | 0.02 |
| E410N | E240N | | | |
| R318Y/R338E/E410N | R150Y/R170E/E240N | 8-42 | 4 | 0.06 |
| Y155F/K247N/N249S/ | Y[155]F/K82N/N84S/ | 18-21 | 2 | 0.01 |
| R318Y/R338E/R403E/ | R150Y/R170E/R233E/ | | | |
| E410N | E240N | | | |

[0622] 3. Duration Response Assessing Wild-Type FIX Coagulant Activity

[0623] Studies were performed to assess the duration of effect of Benefix® Coagulation Factor IX (Recombinant) at 0.5 mg/kg in FIX^{-/-} mice. Mice were dosed intravenously at 48 hr, 24 hr, 16 hr, 8 hr, 4 hr, 2 hr, 30 min and 5 min prior to tail cut. In this experiment, inhibition from the control group was determined where the control group was set at 0% inhibition. Inhibition of blood loss was 59.7±11.9%, 48.25±12.84%, 57.74±9.10%, 56.04±8.46%, 32.09±7.92%, 12.94±7.33%, 38.75±11.47% and 0.64±11.3% at 5 min, 30 min, 2, 4, 8, 16, 24 and 48 hr, respectively from vehicle control (Mean and SEM, n=8-33 mice, from 3 experiments).

[0624] 4. Duration Response Assessing FIXa-R318Y/R338E/R403E/E410N Coagulant Activity

[0625] Studies were performed to assess the duration of effect of FIXa-R318Y/R338E/R403E/E410N at 0.5 mg/kg in FIX^{-/-} mice. Mice were dosed i.v. at 96 hr, 72 hr, 48 hr, 32 hr, 24 hr, 16 hr, 8 hr, 4 hr, 2 hr, 30 min and 5 min prior to tail cut. In this experiment, inhibition from the control group was determined where the control group was set at 0% inhibition. Inhibition of blood loss was 93.26±2.04%, 96.30±3.70%, 85.86±6.52%, 69.4±9.92%, 89.05±3.69%, 78.48±8.71%, 63.33±6.70%, 47.97±10.07%, 3.1±8.22%, −13.52±10.59% and −12.82±7.31% at 5 min, 30 min, 2, 4, 8, 16, 24, 32, 48, 72 and 96 hr, respectively from vehicle control (Mean and SEM, n=8-45 mice, from 4 experiments).

[0626] Note on the FIX^{-/-} Mice:

[0627] The FIX knockout colony of mice was generated by in vitro fertilization using cryo-preserved sperm from male FIX knock out mice. All offspring were genotyped using PCR-based protocols to select those animals that contained a FIX knock-out allele. Further crossings of these animals and their offspring (after PCR-based genotyping) produced FIX knock-out animals (i.e., hemizygous males and homozygous females because the FIX gene is on the X chromosome), as confirmed by PCR. After PCR confirmation of the genotype of all members of this initial FIX colony, PCR confirmation of all colony offspring was ceased since legitimate knock-out animals can only produce knock-out offspring. “Retired breeders” from the colony were, however, genotyped on several occasions. Approximately 7 months after genotyping of all colony offspring was ceased, genotyping of retired breeders clearly indicated the presence of non-knock-out (or wild-type) animals in the colony. Based on this result, all members of the knock-out colony were genotyped and any non-knock-out animals were identified and eliminated from the colony. The results of the colony genotyping indicated that 19% of the male mice were wild type and 4% of the male animals were ambiguous due to poor DNA preparations. Both the wild type and “ambiguous” males (and females) were eliminated from the colony.

[0628] Thus, the FIX knockout colony was contaminated at some point with one or more non-knock-out animals and therefore contained a small fraction of non-knock out animals that increased over time until between 19-23% of the males in the colony contained a wild type FIX gene (in vivo experiments use male mice only). With respect to the FIX data generated and reported in this application, all of the in vitro data is unaffected. With respect to in vivo data, it is assumed and expected that the contamination affected all compounds similarly and therefore does not affect either the rank order of variants or their comparison to BeneFIX. Since the contaminating animals already had endogenous FIX, they would lose much less blood in the efficacy and duration experiments than true hemophilic animals and would benefit much less from administration of exogenous FIX, therefore increasing the “spread” or variability of data for all compounds. The contamination also could make all the compounds appear slightly less potent than they actually are, but their ratio to BeneFIX® should not be altered (i.e., the potency and duration advantage of our lead molecules should be unaffected).

### B. In Vivo Assessment of Wild-Type FIX Procoagulant Activity—New Colony Data

[0629] The data described below comes from a new colony, rebuilt from the confirmed FIX−/− mice described above. Mice were double confirmed by genotyping before being used as breeders. All data described below comes from mice born from breeding units where parents have been double confirmed. All replacement breeders are also double confirmed as FIX−/− prior to initiation of new breeding units.

[0630] Male FIX^{-/-} mice were anesthetized by intraperitoneal administration of a ketamine/xylazine cocktail (45 mg/ml and 3.6 mg/ml in saline) and placed on a heated platform (39° C.) to ensure there was no drop in body temperature. The procedure room was kept at a temperature of 82° F. Ten minutes prior to tail cut the tail was immersed in 10 mL of pre-warmed PBS (15 mL centrifuge tube; 39° C.). Seven to fifteen mice were injected with recombinant human FIX (Benefix® Coagulation Factor IX (Recombinant), Wyeth) or modified FIX polypeptides diluted in a buffer that was the same as that of Benefix® Coagulation Factor IX (Recombinant) (0.234% sodium chloride, 8 mM L-histidine, 0.8% sucrose, 208 mM glycine, 0.004% polysorbate 80) via the tail vein in a single injection. A negative control group of mice received buffer only. In instances where the injection was missed, the animal was excluded from the study.

[0631] Injection with FIX polypeptide or buffer was made 5 minutes prior to tail cut. The tail cut was made using a razor blade 5 mm from the end of the tail and blood was collected into PBS for a period of 20 minutes. At the end of the collection period, total blood loss was assessed. The collection tubes were mixed and a 1 ml aliquot of each sample was taken and assayed for hemoglobin content. Triton X-100 was diluted 1 in 4 in sterile water and 100 μL was added to the 1 mL samples to cause hemolysis. The absorbance of the samples was then measured at a wavelength of 546 nm. To calculate the amount of blood lost, the absorbance was read against a standard curve generated by measuring the absorbance at 546 nm of known volumes of murine blood, diluted in PBS and hemolyzed as above with Triton X 100. Values are expressed as Mean±SEM.

[0632] 1. Dose Response Studies Assessing FIX Coagulant Activity

[0633] Dose response studies to assess the coagulant activity of Benefix® Coagulation Factor IX (Recombinant) and FIX polypeptides at varying doses in FIX^{-/-} mice were performed. In these experiments ED₅₀ values were calculated using non-linear regression and are shown in Table 38 below.

TABLE 38
Dose Response ED₅₀ values

| | Mutation | | | Average |
|---|---|---|---|---|
| | (Chymotrypsin | n/group/ | N | ED50 |
| Mutation | numbering) | expt | (expts) | (mg/kg) |
| BeneFIX ® FIX | BeneFIX ® FIX | 10-14 | 2 | 0.4 |
| WT | Catalyst Biosciences WT | 8-15 | 4 | 1.6 |
| T148A | T[148]A | 10-15 | 2 | 1.0 |
| R318Y/R338E/E410N | R150Y/R170E/E240N | 10-13 | 2 | 0.14 |
| R318Y/R403E/E410N | R150Y/R233E/E240N | 13-15 | 2 | 0.095 |
| R318Y/R338E/R403E/E410N | R150Y/R170E/R233E/E240N | 7-14 | 6 | 0.02 |
| D104N/K106S/Y155F/R318Y/ | D[104]N/K[106]S/Y[155] | 9-14 | 4 | 0.05 |
| R338E/R403E/E410N | F/R150Y/R170E/R233E/E240N | | | |
| T343R | T175R | 9-15 | 4 | 0.9 |
| Y155F/K228N/R318Y/R338E/ | Y[155]F/K63N/R150Y/R170E/ | 10-14 | 2 | 0.08 |
| R403E/E410N | R233E/E240N | | | |
| I251S/R318Y/R338E/E410N | I86S/R150Y/R170E/E240N | 9-18 | 3 | 1.0 |
| K247N/N249S/R318Y/R338E/ | K82N/N84S/R150Y/R170E/ | 9-14 | 4 | 0.06 |
| R403E/E410N | R233E/E240N | | | |
| Y155F/K247N/N249S/R318Y/ | Y[155]F/K82N/N84S/R150Y/ | 9-15 | 4 | 0.03 |
| R338E/R403E/E410N | R170E/R233E/E240N | | | |
| A103N/N105S/K247N/N249S/ | A[103]N/N[105]S/K82N/N84S/ | 8-10 | 2 | 0.08 |
| R318Y/R338E/R403E/E410N | R150Y/R170E/R233E/E240N | | | |
| D104N/K106S/Y155F/K247N/ | D[104]N/K[106]S/Y[155] | 12-15 | 2 | 0.055 |
| N249S/R318Y/R338E/R403E/ | F/K82N/N84S/R150Y/R170E/ | | | |
| E410N | R233E/E240N | | | |
| R318Y/R338E/R403E/E410S | R150Y/R170E/R233E/E240S | 10-15 | 2 | 0.055 |
| D104N/K106S/Y155F/K228N/ | D[104]N/K[106]S/Y[155] | 10-12 | 1 | 1.64 |
| K247N/N249S | F/K63N/K82N/N84S | | | |
| K228N/K247N/N249S/R318Y/ | K63N/K82N/N84S/R150Y/ | 8-15 | 5 | 0.08 |
| R338E/R403E/E410N | R170E/R233E/E240N | | | |
| D104N/K106S/K228N/K247N/ | D[104]N/K[106]S/K63N/ | 13-15 | 2 | 0.125 |
| N249S/R318Y/R338E/R403E/ | K82N/N84S/R150Y/R170E/ | | | |
| E410N | R233E/E240N | | | |
| Y155F/K228N/K247N/N249S/ | Y[155]F/K63N/K82N/N84S/ | 12-15 | 2 | 0.035 |
| R318Y/R338E/R403E/E410N | R150Y/R170E/R233E/E240N | | | |
| R318Y/R338E/R403E/E410N/ | R150Y/R170E/R233E/E240N/ | 8-14 | 3 | 0.03 |
| T412V | T242V | | | |
| R318Y/R338E/R403E/E410N/ | R150Y/R170E/R233E/E240N/ | 11-15 | 2 | 0.04 |
| T412A | T242A | | | |
| K247N/N249S/N260S/R318Y/ | K82N/N84S/N95S/R150Y/ | 8-15 | 4 | 0.26 |
| R338E/R403E/E410N | R170E/R233E/E240N | | | |
| Y155F/ | Y[155]F/K82N/N84S/N95S/ | 13-15 | 3 | 0.06 |
| K247N/N249S/N260S/R318Y/ | R150Y/R170E/R233E/E240N | | | |
| R338E/R403E/E410N | | | | |
| R318Y/R338E/T343R/R403E/ | R150Y/R170E/T175R/R233E/ | 7-15 | 5 | 0.025 |
| E410N | E240N | | | |
| Y155F/R318Y/R338E/T343R/ | Y[155]F/R150Y/R170E/ | 10-14 | 2 | 0.0045 |
| R403E/E410N | T175R/R233E/E240N | | | |
| D104N/K106S/R318Y/R338E/ | D[104]N/K[106]S/R150Y/ | 10-15 | 3 | 0.07 |
| T343R/R403E/E410N | R170E/T175R/R233E/E240N | | | |
| R338E/T343R | R170E/T175R | 11-14 | 2 | 0.83 |
| R318Y/R338E/T343R/N346Y/ | R150Y/R170E/T175R/N178Y/ | 9-13 | 3 | 0.03 |
| R403E/E410N | R233E/E240N | | | |
| Y155F/K247N/N249S/R318Y/ | Y[155]F/K82N/N84S/R150Y/ | 11-15 | 2 | 0.145 |
| R338E/R403E | R170E/R233E | | | |
| Y155F/K247N/N249S/R338E/ | Y[155]F/K82N/N84S/R170E/ | 12-15 | 3 | 0.08 |
| R403E/E410N | R233E/E240N | | | |
| R318Y/R338E/T343R/R403E | R150Y/R170E/T175R/R233E | 10-15 | 2 | 0.025 |
| Y155F/R318Y/R338E/T343R/ | Y[155]F/R150Y/R170E/ | 10-14 | 2 | 0.007 |
| R403E | T175R/R233E | | | |
| R318Y/R338E/T343R/E410N | R150Y/R170E/T175R/E240N | 11-15 | 5 | 0.13 |
| R318Y/T343R/R403E/E410N | R150Y/T175R/R233E/E240N | 10-15 | 2 | 0.03 |
| Y155F/R318Y/T343R/R403E/ | Y[155]F/R150Y/T175R/ | 13-15 | 2 | 0.07 |
| E410N | R233E/E240N | | | |
| R338E/T343R/R403E/E410N | R170E/T175R/R233E/E240N | 11-15 | 2 | 0.045 |
| Y155F/R338E/T343R/R403E/ | Y[155]F/R170E/T175R/ | 10-15 | 2 | 0.055 |
| E410N | R233E/E240N | | | |
| Y155F/K247N/N249S/R318Y/ | Y[155]F/K82N/N84S/R150Y/ | 11-15 | 2 | 0.04 |
| R338E/T343R/R403E/E410N | R170E/T175R/R233E/E240N | | | |
| K247N/N249S/R318Y/R338E/ | K82N/N84S/R150Y/R170E/ | 11-15 | 2 | 0.035 |
| T343R/R403E/E410N | T175R/R233E/E240N | | | |
| K228N/I251S/R318Y/R338E/ | K63N/I86S/R150Y/R170E/ | 10-15 | 3 | 0.01 |
| R403E/E410N | R233E/E240N | | | |
| Y155F/K228N/I251S/R318Y/ | Y[155]F/K63N/I86S/R150Y/ | 13-15 | 2 | 0.04 |
| R338E/R403E/E410N | R170E/R233E/E240N | | | |
| N260S/R318Y/R338E/T343R/ | N95S/R150Y/R170E/T175R/ | 12-15 | 2 | 0.03 |
| R403E/E410N | R233E/E240N | | | |
| Y155F/N260S/R318Y/R338E/ | Y[155]F/N95S/R150Y/R170E/ | 10-15 | 2 | 0.02 |
| T343R/R403E/E410N | T175R/R233E/E240N | | | |
| K228N/K247N/N249S/R318Y/ | K63N/K82N/N84S/R150Y/ | 12-15 | 3 | 0.03 |
| R338E/T343R/R403E/E410N | R170E/T175R/R233E/E240N | | | |
| Y155F/R338E/T343R/R403E | Y[155]F/R170E/T175R/R233E | 12-15 | 1 | 0.06 |
| R338E/T343R/R403E | R170E/T175R/R233E | 10-15 | 2 | 0.195 |
| Y155F/R338E/T343R/R403E/ | Y[155]F/R170E/T175R/ | 12-15 | 3 | 0.06 |
| E410S | R233E/E240S | | | |
| Y155F/N260S/R338E/T343R/ | Y[155]F/N95S/R170E/T175R/ | 12-15 | 1 | 0.1 |
| R403E | R233E | | | |
| Y155F/I251S/R338E/T343R/ | Y[155]F/I86S/R170E/T175R/ | 13-15 | 2 | 0.145 |
| R403E | R233E | | | |
| R318Y/R338E/T343R/R403E/ | R150Y/R170E/T175R/R233E/ | 11-15 | 2 | 0.015 |
| E410S | E240S | | | |
| Y155F/K247N/N249S/T343R/ | Y[155]F/K82N/N84S/T175R/ | 12-14 | 2 | 0.26 |
| R403E | R233E | | | |
| Y155F/K247N/N249S/R318Y/ | Y[155]F/K82N/N84S/R150Y/ | 10-14 | 2 | 0.006 |
| R338E/T343R/R403E | R170E/T175R/R233E | | | |
| K247N/N249S/R318Y/R338E/ | K82N/N84S/R150Y/R170E/ | 10-13 | 2 | 0.009 |
| T343R/R403E | T175R/R233E | | | |
| Y155F/K247N/N249S/R338E/ | Y[155]F/K82N/N84S/R170E/ | 12-13 | 1 | 0.2 |
| T343R/R403E/E410N | T175R/R233E/E240N | | | |
| K247N/N249S/R338E/T343R/ | K82N/N84S/R170E/T175R/ | 11-14 | 1 | 0.01 |
| R403E/E410N | R233E/E240N | | | |
| Y155F/K247N/N249S/R318Y/ | Y[155]F/K82N/N84S/R150Y/ | 13-15 | 2 | 0.04 |
| R338E | R170E | | | |
| K247N/N249S/R338E/T343R/ | K82N/N84S/R170E/T175R/ | 10-15 | 2 | 0.18 |
| R403E/E410N | R233E/E240N | | | |
| Y155F/K247N/N249S/R338E/ | Y[155]F/K82N/N84S/R170E/ | 12-15 | 2 | 0.22 |
| R403E | R233E | | | |
| Y155F/K247N/N249S/R318Y/ | Y[155]F/K82N/N84S/R150Y/ | 12-15 | 2 | 0.12 |
| R338E/T343R/E410N | R170E/T175R/E240N | | | |
| K247N/N249S/R318Y/R338E/ | K82N/N84S/R150Y/R170E/ | 11-14 | 2 | 0.12 |
| T343R/E410N | T175R/E240N | | | |
| Y155F/K247N/N249S/R318Y/ | Y[155]F/K82N/N84S/R150Y/ | 10-15 | 2 | 0.07 |
| T343R/R403E/E410N | T175R/R233E/E240N | | | |
| K247N/N249S/R318Y/T343R/ | K82N/N84S/R150Y/T175R/ | 14-15 | 1 | 0.02 |
| R403E/E410N | R233E/E240N | | | |
| Y155F/K247N/N249S/R318Y/ | Y[155]F/K82N/N84S/R150Y/ | 11-14 | 2 | 0.065 |
| T343R/R403E | T175R/R233E | | | |
| Y155F/K247N/N249S/R318Y/ | Y[155]F/K82N/N84S/R150Y/ | 12-15 | 1 | 0.25 |
| T343R/E410N | T175R/E240N | | | |
| Y155F/K247N/N249S/R338E/ | Y[155]F/K82N/N84S/R170E/ | 10-15 | 2 | 0.125 |
| T343R/R403E | T175R/R233E | | | |
| Y155F/K247N/N249S/T343R/ | Y[155]F/K82N/N84S/T175R/ | 13-14 | 1 | 0.1 |
| R403E/E410N | R233E/E240N | | | |
| Y155F/K247N/N249S/R318Y/ | Y[155]F/K82N/N84S/R150Y/ | 13-14 | 2 | 0.07 |
| R338E/T343R | R170E/T175R | | | |
| Y155F/K247N/N249S/T343R/ | Y[155]F/K82N/N84S/T175R/ | 11-15 | 1 | 0.11 |
| E410N | E240N | | | |

[0634] 2. Duration Response Assessing Wild-Type FIX Coagulant Activity

[0635] Studies were performed to assess the duration of effect of Benefix® Coagulation Factor IX (Recombinant) at 0.5 mg/kg in FIX^{-/-} mice. Mice were dosed intravenously at 48 hr, 32 hr, 24 hr, 16 hr, 8 hr, 4 hr, 2 hr and 5 min prior to tail cut. In this experiment, inhibition from the control group was determined where the control group was set at 0% inhibition. Inhibition of blood loss was 68.6±5.8%, 64±6.98%, 54.7±6.13%, 43.4±6.86%, 13.7±5.53%, 24.9±6.11%, 11.7±4.88% and 5.6±4.17% at 5 min, 2, 4, 8, 16, 24, 32 and 48 hr, respectively from vehicle control (Mean and SEM, n=10-35 mice, from 3 experiments).

[0636] 3. Duration Response Assessing FIX Polypeptide Procoagulant Activity

[0637] Studies were performed to assess the duration of effect of FIX-polypeptides at 0.5 mg/kg in FIX^{-/-} mice. Mice were dosed i.v. at 72 hr, 48 hr, 32 hr, 24 hr, 8 hr and 5 min prior to tail cut, or at 72 hr, 48 hr and 1 hr prior to tail cut. In these experiments, inhibition from the control group was determined where the control group was set at 0% inhibition. Inhibition of blood loss is shown as % inhibition (Mean and SEM) in Table 39.

TABLE 39
Inhibition of blood loss

| Mutation | | | Inhibition (% of vehicle (0) +/− SEM) at each time point (hrs) | | | | | | |
|---|---|---|---|---|---|---|---|---|---|
| (chymotrypsin numbering) | n/group | N (expt) | 0.08 | 1 | 8 | 24 | 32 | 48 | 72 |
| R150Y/R170E/R233E | 24-30 | 2 | 85 +/− 3.2 | | 88.8 +/− 2.8 | 59.5 +/− 7.3 | 71.8 +/− 7.0 | 40.2 +/− 7.8 | 7.8 +/− 5.2 |
| R150Y/R170E/E240N | 37-44 | 3 | 71.6 +/− 3.9 | | 85.0 +/− 3.8 | 59.4 +/− 6.8 | 55.3 +/− 6.1 | 21.0 +/− 6.2 | 27.7 +/− 7.3 |
| Y[155]F/R150Y/R170E/E240N | 26-29 | 2 | | 74.2 +/− 6.5 | | | | 56.8 +/− 9.0 | 15.6 +/− 8.2 |
| R150Y/R233E/E240N | 23-29 | 2 | 71.0 +/− 3.7 | | 71.4 +/− 6.6 | 31.1 +/− 6.1 | 15.8 +/− 4.3 | 4.8 +/− 5.4 | −0.4 +/− 2.9 |
| R150Y/R170E/R233E/E240N | 75-86 | 7 | 75.9 +/− 2 | | 82.7 +/− 2.6 | 58 +/− 4.8 | 63.6 +/− 4.4 | 31.1 +/− 4.9 | 3.5 +/− 2.7 |
| Y[155]F/R150Y/R170E/R233E/E240N | 25-30 | 2 | | 88.5 +/− 1.7 | | | | 22.2 +/− 8.2 | −17.6 +/− 3.6 |
| D[104]N/K[106]S/Y[155]F/R150Y/R170E/R233E/E240N | 35-44 | 3 | 70.8 +/− 3.0 | | 85.5 +/− 3.5 | 55.1 +/− 5.4 | 48.3 +/− 7.2 | 27.3 +/− 5.7 | 12.1 +/− 3.0 |
| T175R | 23-28 | 2 | 43.7 +/− 6.3 | | 30.9 +/− 6.6 | 23.8 +/− 3.8 | 12.3 +/− 6.1 | 14.8 +/− 7.1 | 3.4 +/− 3.1 |
| Y[155]F/K63N/R150Y/R170E/R233E/E240N | 36-43 | 3 | 65.2 +/− 3.0 | | 72.2 +/− 4.5 | 59.2 +/− 6.5 | 42.4 +/− 8.3 | 41.2 +/− 7.6 | 4.7 +/− 5.6 |
| K82N/N84S/R150Y/R170E/R233E/E240N | 37-41 | 3 | 78.7 +/− 2.5 | | 85.9 +/− 2.6 | 52.5 +/− 5.5 | 49.9 +/− 6.8 | 31.4 +/− 5.9 | 5.0 +/− 4.2 |
| Y[155]F/K82N/N84S/R150Y/R170E/R233E/E240N | 57-65 | 5 | 79.1 +/− 2.2 | | 79.5 +/− 2.7 | 66.7 +/− 4.0 | 61.1 +/− 4.8 | 38.2 +/− 5.2 | 17.1 +/− 4.0 |
| D[104]N/K[106]S/Y[155]F/K82N/N84S/R150Y/R170E/R233E/E240N | 20-29 | 2 | 71.2 +/− 4.5 | | 74.2 +/− 6.6 | 61.2 +/− 7.2 | 48.7 +/− 8.2 | 54.1 +/− 7.7 | 12.3 +/− 6.5 |
| K82N/N84S/R150Y/R170E/E240N | 23-28 | 2 | | 76.0 +/− 6.6 | | | | 26.2 +/− 8.7 | 22.3 +/− 7.1 |
| Y[155]F/K82N/N84S/R150Y/R170E/E240N | 26-30 | 2 | | 77.7 +/− 5.1 | | | | 16.0 +/− 7.3 | −2.2 +/− 4.3 |
| R150Y/R170E/R233E/E240S | 35-42 | 3 | 79.3 +/− 1.9 | | 75.6 +/− 4.6 | 51.0 +/− 5.4 | 48.3 +/− 6.5 | 12.3 +/− 5.3 | −5.6 +/− 2.4 |
| K63N/K82N/N84S/R150Y/R170E/R233E/E240N | 32-38 | 3 | 72.6 +/− 2.9 | | 78.6 +/− 3.7 | 44.2 +/− 7 | 53.9 +/− 7.1 | 42.9 +/− 6.9 | 10.4 +/− 5.4 |
| D[104]N/K[106]S/K63N/K82N/N84S/R150Y/R170E/R233E/E240N | 26-28 | 2 | 81.6 +/− 3.5 | | 86.0 +/− 3.6 | 46.8 +/− 8.0 | 59.7 +/− 7.7 | 33.8 +/− 8.3 | 26.2 +/− 5.8 |
| Y[155]F/K63N/K82N/N84S/R150Y/R170E/R233E/E240N | 23-29 | 2 | 85.5 +/− 2.2 | | 75.6 +/− 4.0 | 70.6 +/− 6.5 | 58.4 +/− 6.3 | 27.0 +/− 7.7 | 14.1 +/− 7.8 |
| R150Y/R170E/R233E/E240N/T242V | 40-44 | 3 | 69.5 +/− 3.2 | | 85.5 +/− 2.6 | 37.5 +/− 5.1 | 42.8 +/− 6.2 | 9.0 +/− 6.6 | −3.8 +/− 3.4 |
| R150Y/R170E/R233E/E240N/T242A | 29-38 | 3 | 81.3 +/− 2.5 | | 85.6 +/− 3.3 | 45.2 +/− 6.2 | 35.6 +/− 6.3 | 29.3 +/− 6.0 | 3.7 +/− 3.1 |
| K82N/N84S/N95S/R150Y/R170E/R233E/E240N | 20-28 | 2 | 46.4 +/− 6.6 | | 37.7 +/− 7.5 | 4.0 +/− 2.6 | 16.0 +/− 4.7 | 0.08 +/− 3.8 | −6.1 +/− 2.4 |
| Y[155]F/K82N/N84S/N95S/R150Y/R170E/R233E/E240N | 37-43 | 3 | 72.2 +/− 4.4 | | 69.1 +/− 5.4 | 47.0 +/− 6.1 | 44.3 +/− 6.2 | 27.0 +/− 6.4 | 8.1 +/− 5.3 |
| R150Y/R170E/T175R/R233E/E240N | 32-38 | 3 | 80.3 +/− 2.6 | | 78.2 +/− 3.8 | 68.3 +/− 5.5 | 69.4 +/− 6.0 | 23.2 +/− 7.2 | 4.9 +/− 5.8 |
| Y[155]F/R150Y/R170E/T175R/R233E/E240N | 21-27 | 2 | 84.8 +/− 2.5 | | 87.8 +/− 2.8 | 76.6 +/− 4.2 | 66.7 +/− 6.6 | 56.8 +/− 8.0 | 8.2 +/− 8.0 |
| D[104]N/K[106]S/R150Y/R170E/T175R/R233E/E240N | 26-30 | 2 | 80.4 +/− 2.8 | | 81.5 +/− 4.8 | 69.5 +/− 7.6 | 60.4 +/− 7.9 | 54.8 +/− 6.7 | 12.8 +/− 6.3 |
| R150Y/R170E/T175R/N178Y/R233E/E240N | 35-43 | 3 | 76.6 +/− 3.1 | | 85.1 +/− 3.3 | 43.9 +/− 5.7 | 47.9 +/− 6.8 | 14.9 +/− 6.2 | −12.1 +/− 2.9 |
| Y[155]F/K82N/N84S/R150Y/R170E/R233E | 24-30 | 2 | 76.2 +/− 3.0 | | 85.6 +/− 4.7 | 49.6 +/− 6.5 | 61.1 +/− 7.4 | 46.0 +/− 6.9 | 0.4 +/− 4.9 |
| K82N/N84S/R150Y/R170E/R233E | 27-29 | 2 | | 70.0 +/− 5.8 | | | | 18.8 +/− 6.3 | 2.1 +/− 2.7 |
| Y[155]F/K82N/N84S/R170E/R233E/E240N | 38-44 | 3 | 69.8 +/− 4.7 | | 78.4 +/− 4.1 | 56.4 +/− 5.9 | 58.4 +/− 5.8 | 51.1 +/− 6.6 | 26.9 +/− 5.4 |
| K82N/N84S/R170E/R233E/E240N | 28-30 | 2 | | 63.9 +/− 7.2 | | | | 16.7 +/− 6.3 | −7.0 +/− 2.0 |
| R150Y/R170E/T175R/R233E | 37-43 | 3 | 80.0 +/− 2.1 | | 83.5 +/− 3.5 | 62.1 +/− 5.6 | 62.6 +/− 5.3 | 50.5 +/− 5.9 | 1.9 +/− 4.0 |
| Y[155]F/R150Y/R170E/T175R/R233E | 24-28 | 2 | 80.4 +/− 3.0 | | 90.7 +/− 2.1 | 65.7 +/− 6.6 | 67.2 +/− 7.3 | 52.2 +/− 8.2 | 41.1 +/− 8.3 |
| R150Y/R170E/T175R/E240N | 35-44 | 3 | 65.5 +/− 4.7 | | 74.1 +/− 5.3 | 55.8 +/− 5.6 | 53.1 +/− 6.8 | 46.4 +/− 6.7 | 34.9 +/− 6.0 |
| R150Y/T175R/R233E/E240N | 29-30 | 2 | 74.1 +/− 3.6 | | 77.7 +/− 3.9 | 55.3 +/− 7.5 | 39.4 +/− 8.1 | 24.5 +/− 7.6 | 6.8 +/− 4.8 |
| Y[155]F/R150Y/T175R/R233E/E240N | 25-29 | 2 | | 92.7 +/− 2.1 | | | | 29.3 +/− 6.1 | 7.7 +/− 3.2 |
| R170E/T175R/R233E/E240N | 26-30 | 2 | 67 +/− 5.3 | | 87.4 +/− 4.2 | 55.9 +/− 8.7 | 47.2 +/− 8.6 | 33.0 +/− 8.4 | 9.2 +/− 5.3 |
| Y[155]F/R170E/T175R/R233E/E240N | 34-43 | 3 | 77.8 +/− 4.2 | | 90.8 +/− 2.8 | 68.6 +/− 5.2 | 61.3 +/− 5.8 | 35.6 +/− 8.3 | 5.9 +/− 5.0 |
| Y[155]F/K82N/N84S/R150Y/R170E/T175R/R233E/E240N | 39-43 | 3 | 76.0 +/− 3.0 | | 80.4 +/− 3.3 | 72.7 +/− 3.8 | 64.2 +/− 5.4 | 51.4 +/− 5.7 | 33.1 +/− 7.3 |
| K82N/N84S/R150Y/R170E/T175R/R233E/E240N | 42-44 | 3 | 83.0 +/− 2.4 | | 81.0 +/− 2.4 | 73.8 +/− 5.2 | 57.1 +/− 5.7 | 48.5 +/− 6.1 | 16.9 +/− 6.8 |
| K63N/I86S/R150Y/R170E/R233E/E240N | 21-26 | 2 | 71.9 +/− 3.6 | | 85.8 +/− 4.0 | 71.3 +/− 6.8 | 54.8 +/− 7.3 | 40.3 +/− 10.3 | 23.1 +/− 10.4 |
| Y[155]F/K63N/I86S/R150Y/R170E/R233E/E240N | 26-29 | 2 | 82.1 +/− 2.7 | | 83.6 +/− 3.7 | 65.6 +/− 5.5 | 57.2 +/− 7.9 | 38.4 +/− 8.9 | 16.5 +/− 7.7 |
| N95S/R150Y/R170E/T175R/R233E/E240N | 24-29 | 2 | 75.5 +/− 4.5 | | 76.6 +/− 4.3 | 82.2 +/− 5.8 | 84.7 +/− 3.9 | 41.6 +/− 8.6 | 20.1 +/− 6.0 |
| Y[155]F/N95S/R150Y/R170E/T175R/R233E/E240N | 21-27 | 2 | 85.2 +/− 2.5 | | 89.7 +/− 3.6 | 46.5 +/− 7.0 | 63.3 +/− 8.0 | 41.6 +/− 8.8 | 9.1 +/− 6.5 |
| K63N/K82N/N84S/R150Y/R170E/T175R/R233E/E240N | 34-45 | 3 | 83.9 +/− 1.8 | | 79.8 +/− 3.6 | 75.2 +/− 4.9 | 80.9 +/− 3.0 | 73.0 +/− 4.4 | 43.8 +/− 6.6 |
| Y[155]F/K63N/K82N/N84S/R150Y/R170E/T175R/R233E/E240N | 24-26 | 2 | | 84.6 +/− 3.4 | | | | 70.6 +/− 7.5 | 50.9 +/− 8.6 |
| Y[155]F/R170E/T175R/R233E | 22-30 | 2 | 81.9 +/− 3.6 | | 79.2 +/− 6.2 | 55.0 +/− 8.0 | 44.4 +/− 9.9 | 26.8 +/− 6.8 | −6.5 +/− 2.7 |
| R170E/T175R/R233E | 23-28 | 2 | 60.6 +/− 6.4 | | 86.5 +/− 4.3 | 35.6 +/− 8.3 | 35.8 +/− 8.5 | 18.9 +/− 6.8 | 12.1 +/− 6.0 |
| Y[155]F/R170E/T175R/R233E/E240S | 24-27 | 2 | 71.2 +/− 4.5 | | 77.8 +/− 5.3 | 54.6 +/− 8.2 | 58.3 +/− 8.1 | 21.9 +/− 7.1 | −11.0 +/− 3.4 |
| Y[155]F/N95S/R170E/T175R/R233E | 25-29 | 2 | 58.2 +/− 7.9 | | 65.5 +/− 8.3 | 48.2 +/− 10.0 | 29.3 +/− 9.3 | 21.0 +/− 6.7 | −14.8 +/− 5.3 |
| Y[155]F/I86S/R170E/T175R/R233E | 23-30 | 2 | 84.1 +/− 5.1 | | 90.9 +/− 2.7 | 76.6 +/− 6.4 | 62.4 +/− 6.7 | 55.2 +/− 7.9 | 23.7 +/− 6.5 |
| R150Y/R170E/T175R/R233E/E240S | 27-43 | 3 | 80.2 +/− 2.5 | | 87.1 +/− 3.2 | 76.9 +/− 4.0 | 67.9 +/− 5.6 | 48.3 +/− 5.5 | 21.0 +/− 5.0 |
| Y[155]F/K82N/N84S/T175R/R233E | 12-29 | 2 | 70.5 +/− 6.9 | 84.2 +/− 5.4 | 53.2 +/− 12.3 | 39.5 +/− 11.1 | 18.0 +/− 7.3 | 17.0 +/− 5.4 | −7.4 +/− 3.1 |
| Y[155]F/K82N/N84S/R150Y/R170E/T175R/R233E | 36-41 | 3 | 79.6 +/− 3.2 | | 90.5 +/− 2.4 | 73.8 +/− 4.6 | 75.0 +/− 5.0 | 74.4 +/− 4.7 | 27.5 +/− 6.5 |
| K82N/N84S/R150Y/R170E/T175R/R233E | 22-28 | 2 | 84.3 +/− 3.1 | | 91.8 +/− 1.4 | 60.1 +/− 6.7 | 54.0 +/− 8.1 | 43.6 +/− 8.8 | 35.7 +/− 8.7 |
| Y[155]F/K82N/N84S/R170E/T175R/R233E/E240N | 25-30 | 2 | | 91.1 +/− 1.8 | | | | 22.7 +/− 6.6 | 12.8 +/− 6.2 |
| K82N/N84S/R170E/T175R/R233E/E240N | 25-28 | 2 | | 82.7 +/− 4.5 | | | | 67.1 +/− 7.7 | 21.6 +/− 8.0 |
| Y[155]F/K82N/N84S/R150Y/R170E | 20-29 | 2 | | 83.3 +/− 3.9 | | | | 47.8 +/− 7.0 | 19.4 +/− 6.2 |
| Y[155]F/K82N/N84S/R150Y/T175R | 24-28 | 2 | | 43.6 +/− 6.5 | | | | 4.9 +/− 4.6 | 7.2 +/− 1.9 |
| Y[155]F/K82N/N84S/R170E/R233E | 15-30 | 2 | 47.2 +/− 8.0 | 64.7 +/− 9.7 | 90.8 +/− 4.5 | 78.4 +/− 7.5 | 49.2 +/− 11.5 | 19.7 +/− 7.9 | −5.8 +/− 4.2 |
| Y[155]F/K82N/N84S/R170E/T175R | 25-27 | 2 | | 70.5 +/− 7.0 | | | | 34.0 +/− 7.4 | 27.9 +/− 6.4 |
| Y[155]F/K82N/N84S/R150Y/R170E/T175R/E240N | 28-30 | 2 | | 73.7 +/− 6.7 | | | | 30.1 +/− 8.4 | 43.1 +/− 7.9 |
| K82N/N84S/R150Y/R170E/T175R/E240N | 25-29 | 2 | | 77.2 +/− 6.0 | | | | 29.5 +/− 7.2 | 29.0 +/− 5.5 |
| Y[155]F/K82N/N84S/R150Y/T175R/R233E/E240N | 26-28 | 2 | | 87.6 +/− 2.4 | | | | 42.6 +/− 8.6 | 14.5 +/− 6.4 |
| K82N/N84S/R150Y/T175R/R233E/E240N | 28-30 | 2 | | 91.3 +/− 2.6 | | | | 52.4 +/− 7.7 | 6.6 +/− 4.5 |
| Y[155]F/K82N/N84S/R170E/E240N | 25-30 | 2 | | 74.6 +/− 6.4 | | | | 30.1 +/− 7.1 | 12.4 +/− 6.3 |
| Y[155]F/K82N/N84S/R150Y/T175R/R233E | 27-30 | 2 | | 85.2 +/− 4.4 | | | | 31.1 +/− 7.8 | −7.9 +/− 2.6 |
| K82N/N84S/R150Y/T175R/E240N | 25-30 | 2 | | 51.9 +/− 8.2 | | | | 9.4 +/− 4.9 | 3.2 +/− 4.5 |
| Y[155]F/K82N/N84S/R170E/T175R/R233E | 27-29 | 2 | | 84.6 +/− 5.0 | | | | 26.8 +/− 8.5 | 10.9 +/− 6.9 |
| K82N/N84S/R170E/T175R/R233E | 27-29 | 2 | | 73.0 +/− 6.6 | | | | 27.3 +/− 7.7 | 23.4 +/− 5.6 |
| K82N/N84S/R170E/T175R/E240N | 24-29 | 2 | | 59.1 +/− 8.0 | | | | 29.6 +/− 7.4 | 12.2 +/− 5.2 |
| Y[155]F/K82N/N84S/T175R/R233E/E240N | 28-30 | 2 | | 86.5 +/− 3.9 | | | | 34.6 +/− 8.1 | −2.3 +/− 4.0 |
| K82N/N84S/T175R/R233E/E240N | 25-29 | 2 | | 59.2 +/− 8.2 | | | | 1.0 +/− 4.0 | −7.3 +/− 2.8 |
| Y[155]F/T175R/R233E/E240N | 24-28 | 2 | | 78.7 +/− 4.9 | | | | −5.7 +/− 2.8 | −4.2 +/− 3.7 |
| Y[155]F/K82N/N84S/R150Y/R170E/T175R | 28-30 | 2 | | 82.3 +/− 5.4 | | | | 64.6 +/− 7.4 | 41.4 +/− 7.7 |
| K82N/N84S/R150Y/R170E/T175R | 37-43 | 3 | | 79.3 +/− 4.2 | | | | 47.7 +/− 5.3 | 20.9 +/− 5.5 |
| R170E/T175R/E240N | 37-41 | 3 | | 66.6 +/− 5.9 | | | | 31.5 +/− 6 | 10.4 +/− 3.6 |
| R150Y/T175R/E240N | 24-28 | 2 | | 83.5 +/− 5.1 | | | | 36.7 +/− 8.9 | 20.0 +/− 6.7 |
| K63N/R150Y/R170E/T175R/R233E/E240N | 23-29 | 2 | | 84.5 +/− 3.1 | | | | 66.3 +/− 7.8 | 41.2 +/− 8.5 |
| K63N/K82N/N84S/R150Y/R170E/T175R/R233E | 22-28 | 2 | | 81.9 +/− 4.1 | | | | 62.2 +/− 8.2 | 28.6 +/− 8.0 |

### Example 8

### Determination of the Functional Cofactor Binding (K_{D-app}) of FIXa for its Cofactor, Factor VIIIa

[0638] The functional cofactor binding (K_{D-app}) of the FIXa variants for the cofactor Factor VIIIa (FVIIIa) in the presence or saturating substrate, Factor X (FX), was assessed indirectly in a fluorogenic assay by assaying for the activity of FXa, generated upon activation by FIXa, on the synthetic substrate Spectrafluor FXa. A range of FVIIIa concentrations were used to calculate the apparent kinetic rate constant (K_{D-app}) where the cofactor (FVIIIa) was in excess by at least a 1000-fold over the concentration of the activating protease (FIXa). The experiment was designed to be a variation of the assay described in Example 4 (Determination of the Catalytic Activity of FIXa for its Substrate, Factor X) where the cofactor (FVIIIa) at various concentrations is pre-incubated with FIXa in the presence of phospholipid vesicles forming the tenase (Xase) complex prior to assessing the catalytic activity with saturating levels of the substrate, FX. Briefly, activated and active site titrated FIXa was incubated in a calcium-containing buffer with phospholipid vesicles while separately recombinant FVIII is activated (to FVIIIa) with alpha-thrombin. The activity of alpha-thrombin was then quenched by the addition of a highly specific thrombin inhibitor, hirudin, prior to initiating the assay. FIXa variants were then mixed with various concentrations of FVIIIa to form the Xase complex and subsequently mixed with saturating concentrations of FX and the fluorescent substrate, Spectrafluor FXa (CH₃SO₂-D-CHA-Gly-Arg-AMC) to initiate the assay. The release of the free fluorophore, AMC (7-amino-4-methylcoumarin) following catalysis of Spectrafluor FXa by FXa was then assessed continuously over a time period, and the kinetic rate constants of the FIXa variants determined.

### A. Assay Protocol

[0639] For assays evaluating the kinetic rate of FX activation by FIXa in the presence of various FVIIIa concentrations and phospholipids, recombinant FVIII (Kogenate FS®; Bayer healthcare) was first resuspended in 1 mL of the provided diluent. The molar concentration of FVIII was then determined by absorbance at 280 nm using an extinction coefficient of 1.567 mg⁻¹ mL cm⁻¹ and a molecular weight of 163.6 kDa. The FIX variants were expressed, purified, activated and active site titrated as described in Examples 1-3, above. FIXa variants were then serially diluted to a concentration of 8 pM (4×) in a 1 mL volume of 1× Buffer A (20 mM Hepes/150 mM NaCl/5 mM CaCl₂)/0.1% BSA/0.1% PEG-8000, pH 7.4). In preparation for activation of FVIII to FVIIIa in the presence phospholipids, alpha-thrombin (Heamatologic Technologies, Inc.) and hirudin (American Diagnostica) were each diluted from the manufacturer's stock concentrations 1:100 in 1× Buffer A. Reconstituted FVIII was further diluted to a concentration of 1600 nM (4× of the top dose) in a 1.6 mL volume of 1× Buffer A containing 400 μM freshly resuspended phospholipids (75% phosphatidylcholine (PC)/25% phosphatidylserine (PS); PS/PC vesicles ˜120 nm in diameter; Avanti Polar Lipids). FVIII was activated to FVIIIa by mixing the above FVIII/PC/PS solution with a final concentration of 15 nM alpha-thrombin solutions followed by 15 minutes of incubation at 25° C. Activation reactions were subsequently quenched by the addition of hirudin to a final concentration of 150 nM for 5 min at 25° C. prior to initiating a dilution series of 1.5-fold in a 12-channel deep-well polypropylene plate with a final volume of 0.5 mL of the activated FVIIIa into 1× Buffer A containing 400 μM PC/PS vesicles. The final concentrations of FVIIIa (4×) were 1600 nM, 1066.7 nM, 711.1 nM, 474.1 nM, 316.1 nM, 210.7 nM, 140.5 nM, 93.6 nM, 62.43 nM, 41.6 nM. 27.8 nM and 0 nM for a 12-point assay or for an alternative 8-point assay with a 2-fold dilution series; 1600 nM, 600 nM, 400 nM, 200 nM, 100 nM, 50 nM, 25 nM and 0 nM. The dilution series of FVIIIa was subsequently mixed 1:1 with the 4×FIXa dilutions (12.5 μL each) in a 96-well half-area black assay plate according to a predefined plate map (4 FIXa variants/plate) and pre-incubated 15 min at 25° C. to form Xase complexes with varied concentrations of FVIIIa. Final 2× solutions (25 μL) were as follows: 4 pM FIXa variant, 1600-0 nM FVIIIa, 200 μM PC/PS vesicles, 7.5 nM alpha-thrombin (inhibited) and 75 nM hirudin.

[0640] A solution of 1000 nM (2×) active site titrated and DFP/EGR-cmk treated FX (see Example 2, above) was prepared in 20 mL of 1× Buffer A containing 1.0 mM Spectrafluor Xa substrate providing a sufficient volume for 4 assays. This represented a 2× saturating concentration of FX that would be at least 5-20-fold above the K_{M} values reported in Example 4, Table 25. Assay reactions were typically initiated using a BioMek FX liquid handling system programmed to dispense 25 μL of the FX/Spectrafluor Xa dilutions into 4 assay plates containing 25 μL of each FIXa variant and FVIIIa dilution (Xase complexes). The final concentrations of the reagents in the assay were as follows: 2 pM FIXa, 400-0 nM FVIIIa, 100 μM PC/PS vesicles, 0.5 mM Spectrafluor Xa, 3.8 nM alpha-thrombin (inhibited), 38 nM hirudin and FX at 500 nM. Reactions were monitored in a SpectraMax fluorescence plate reader for 30 min at 37° C. A standard curve of free AMC served as the conversion factor for RFU to μM in the subsequent data analysis calculations using a dose range that covered 0 μM to 100 μM AMC.

### B. Data Analysis

[0641] To determine functional affinity of FIXa variants for FVIIIa based on their catalytic activity, raw data collected with the SoftMax Pro application (Molecular Devices) were exported as .TXT files. Further non-linear data analyses were performed directly within the ActivityBase software package using the XE Runner data analysis module (IDBS Software). Data analyses were essentially as described in Example 4B with minor modifications. The Abase template was set up to automatically fit the parabolic reaction velocities (μM/sec²) of the tested FIXa variants at each FVIIIa concentration to the function of a standard rectangular hyperbola (i.e. Michaelis Menten equation) given by equation (1) to yield the fit values for Vₘₐₓ and K_{D-app}.

$$Reaction Velocity ( {\text{µ} \text{M} \text{/sec}}^{2} ) = \frac{{V}_{max} [ {S}_{0} ]}{{K}_{D - a p p} + [ {S}_{0} ]} \qquad Equation ( 1 )$$

[0642] Table 40 sets forth the functional affinity (K_{D-app}) for each of the FIXa variants assayed. Also assayed were recombinant wild-type FIXa (termed Catalyst Biosciences WT; generated as described above in Example 1), plasma purified FIXa (Haematologic Technologies, Inc.), and BeneFIX® (Coagulation Factor IX (Recombinant); Wyeth). Table 40 presents the results expressed as the kinetic constant for affinity, K_{D-app} (nM), and also as ratio of the functional affinity of the wild-type FIXa compared to that of the FIXa variant, wherein the functional affinity of each FIXa variant is defined by the K_{D-app} (nM) value for activation of the substrate, FX. Where the activity of the FIXa variant was compared to wild-type FIXa, it was compared to a recombinant wild-type FIXa polypeptide that was expressed and purified using the same conditions as used for the variant FIXa polypeptides to ensure that any differences in activity were the result of the mutation(s), and not the result of differences in, for example, post-translational modifications associated with different expression systems. Thus, the wild-type FIXa polypeptide used for comparison was the recombinant wild-type FIXa generated from cloning the FIX gene set forth in SEQ ID NO:1 and expressed from CHOX cells as a polypeptide with an amino acid sequence set forth in SEQ ID NO:3, as described in Example 1 (i.e., Catalyst Biosciences WT FIX polypeptide). The standard deviation (S.D.), coefficient of variation (as a percentage; % CV) and the number of assays performed (n) also are provided.

[0643] While some variants showed similar to wild-type affinities or nominal increases in K_{D-app} (e.g., FIXa-R318Y/R338E and FIXa-R318Y/R338E/R403E/E410N) several variants showed marked increases in functional affinity with greater than 6-10 fold increases in K_{D-app}. Variants with combinations of the R338E, T343R and E410N mutations showed the greatest improvements in functional affinity. For instance, FIXa-R338E/T343R, FIXa-R318Y/R338E/T343R/E410N, FIXa-R318Y/R338E/E410N, FIXa-Y155F/K247N/N249S/R318Y/R338E/T343R/R403E/E410N, FIXa-R338E/E410N and FIXa-K228N/247N/N249S/R318Y/R338E/T343R/E410N are among this group.

TABLE 40
Functional Cofactor Affinity of FIXa variants (K_{D-app})

| Mutation | Mutation | K_{D-app} | ±S.D. | | K_{D-WT}/ | |
|---|---|---|---|---|---|---|
| (Mature FIX Numbering) | (Chymotrypsin Numbering) | (nM) | (nM) | % CV | K_{D-mut} | n |
| BeneFIX Benefix ® Coagulation | BeneFIX Benefix ® Coagulation | 90.2 | 13.5 | 15% | 1.1 | 4 |
| FIX (T148A) | FIX (T[148]A) | | | | | |
| Plasma Purified FIXa | Plasma Purified FIXa | 101.6 | 5.8 | 6% | 0.9 | 3 |
| Catalyst Biosciences WT | Catalyst Biosciences WT | 95.5 | 4.6 | 5% | 1.0 | 2 |
| T148A | T[148]A | 79.7 | 27.1 | 34% | 1.2 | 2 |
| D104N/K106S/I251S | D[104]N/K[106]S/I86S | 305.5 | 119.5 | 39% | 0.3 | 2 |
| A262S | A95bS | 94.1 | 18.3 | 19% | 1.0 | 2 |
| E410N | E240N | 74.2 | 0.6 | 1% | 1.3 | 2 |
| E239N | E74N | 77.3 | 40.6 | 53% | 1.2 | 2 |
| T241N/H243S | T76N/H78S | 75.5 | 26.2 | 35% | 1.3 | 2 |
| S319N/L321S | S151N/L153S | 52.4 | 0.7 | 1% | 1.8 | 2 |
| R318E | R150E | 67.0 | 5.2 | 8% | 1.4 | 2 |
| R318Y | R150Y | 192.0 | 55.2 | 29% | 0.5 | 2 |
| R312Q | R143Q | 45.2 | 5.6 | 12% | 2.1 | 2 |
| R312A | R143A | 52.9 | 5.9 | 11% | 1.8 | 2 |
| R312Y | R143Y | 85.2 | 36.5 | 43% | 1.1 | 2 |
| R312L | R143L | 68.9 | 15.6 | 23% | 1.4 | 2 |
| V202Y | V38Y | 61.5 | 3.5 | 6% | 1.6 | 2 |
| D203Y | D39Y | 77.4 | 11.8 | 15% | 1.2 | 2 |
| A204M | A40M | 60.6 | 9.0 | 15% | 1.6 | 2 |
| K400A/R403A | K230A/R233A | 129.5 | 13.4 | 10% | 0.7 | 2 |
| K400E/R403E | K230E/R233E | 298.0 | 58.0 | 19% | 0.3 | 2 |
| R403E | R233E | 654.0 | 131.6 | 20% | 0.1 | 3 |
| K400A | K230A | 98.9 | 7.2 | 7% | 1.0 | 2 |
| K293A | K126A | 86.6 | 4.0 | 5% | 1.1 | 2 |
| R338E | R170E | 43.0 | 7.2 | 17% | 2.2 | 2 |
| R338E/R403E | R170E/R233E | 183.0 | 42.4 | 23% | 0.5 | 2 |
| R338E/E410N | R170E/E240N | 4.1 | 1.4 | 33% | 23.5 | 3 |
| R338E/R403E/E410N | R170E/R233E/E240N | 54.9 | 3.0 | 6% | 1.7 | 2 |
| R318Y/R338E/R403E | R150Y/R170E/R233E | 340.0 | 244.7 | 72% | 0.3 | 2 |
| R403E/E410N | R233E/E240N | 910.5 | 197.3 | 22% | 0.1 | 2 |
| R318Y/R338E/E410N | R150Y/R170E/E240N | 7.7 | 4.6 | 60% | 12.4 | 17 |
| D104N/K106S/R318Y/R338E/ | D[104]N/K[106]S/R150Y/R170E/ | 12.4 | n.d. | n.d. | 7.7 | 1 |
| E410N | E240N | | | | | |
| R318Y/R338E/R403E/E410N | R150Y/R170E/R233E/E240N | 47.0 | 12.4 | 26% | 2.0 | 12 |
| D104N/K106S/Y155F/R318Y/ | D[104]N/K[106]S/Y[155]F/ | 61.6 | n.d. | n.d. | 1.6 | 1 |
| R338E/R403E/E410N | R150Y/R170E/R233E/E240N | | | | | |
| K316N | K148N | 66.4 | 8.3 | 13% | 1.4 | 2 |
| H257E | H92E | 81.3 | 2.5 | 3% | 1.2 | 2 |
| E410S | E240S | 99.6 | 2.0 | 2% | 1.0 | 2 |
| N346D | N178D | 126.5 | 3.5 | 3% | 0.8 | 2 |
| N346Y | N178Y | 65.7 | n.d. | n.d. | 1.5 | 1 |
| Y345A | Y177A | 29.6 | 2.3 | 8% | 3.2 | 2 |
| T343R | T175R | 58.4 | 16.2 | 28% | 1.6 | 3 |
| T343R/Y345T | T175R/Y177T | 68.1 | n.d. | n.d. | 1.4 | 1 |
| R318Y/R338E | R150Y/R170E | 28.9 | n.d. | n.d. | 3.3 | 1 |
| Y259F/K265T/Y345T | Y94F/K98T/Y177T | 115.2 | n.d. | n.d. | 0.8 | 1 |
| K228N/I251S | K63N/I86S | 89.7 | 1.3 | 1% | 1.1 | 2 |
| Y155F/K228N/R318Y/R338E/ | Y[155]F/K63N/R150Y/R170E/ | 31.2 | 4.8 | 15% | 3.1 | 2 |
| R403E/E410N | R233E/E240N | | | | | |
| I251S/R318Y/R338E/R403E/ | I86S/R150Y/R170E/R233E/ | 62.7 | 0.6 | 1% | 1.5 | 2 |
| E410N | E240N | | | | | |
| D104N/K106S/I251S/R318Y/ | D[104]N/K[106]S/I86S/R150Y/ | 54.7 | 19.9 | 36% | 1.7 | 5 |
| R338E/R403E/E410N | R170E/R233E/E240N | | | | | |
| I251S/R318Y/R338E/E410N | I86S/R150Y/R170E/E240N | 5.7 | 1.1 | 20% | 16.7 | 3 |
| D104N/K106S/I251S/R318Y/ | D[104]N/K[106]S/I86S/R150Y/ | 12.4 | 1.1 | 9% | 7.7 | 2 |
| R338E/E410N | R170E/E240N | | | | | |
| K247N/N249S/R318Y/R338E/ | K82N/N84S/R150Y/R170E/ | 68.6 | 17.3 | 25% | 1.4 | 3 |
| R403E/E410N | R233E/E240N | | | | | |
| Y155F/K247N/N249S/R318Y/ | Y[155]F/K82N/N84S/R150Y/ | 45.8 | 4.6 | 10% | 2.1 | 7 |
| R338E/R403E/E410N | R170E/R233E/E240N | | | | | |
| A103N/N105S/K247N/N249S/ | A[103]N/N[105]S/K82N/N84S/ | 93.1 | 8.4 | 9% | 1.0 | 2 |
| R318Y/R338E/R403E/E410N | R150Y/R170E/R233E/E240N | | | | | |
| D104N/K106S/K247N/N249S/ | D[104]N/K[106]S/K82N/N84S/ | 87.4 | 10.3 | 12% | 1.1 | 2 |
| R318Y/R338E/R403E/E410N | R150Y/R170E/R233E/E240N | | | | | |
| Y155F/K247N/N249S/R318Y/ | Y[155]F/K82N/N84S/R150Y/ | 7.4 | n.d. | n.d. | 12.8 | 1 |
| R338E/E410N | R170E/E240N | | | | | |
| R318Y/R338E/R403E/E410S | R150Y/R170E/R233E/E240S | 53.1 | 10.4 | 20% | 1.8 | 3 |
| R318Y/R338E/E410S | R150Y/R170E/E240S | 6.8 | 0.2 | 3% | 14.1 | 3 |
| K228N/K247N/N249S | K63N/K82N/N84S | 113.0 | 0.0 | 0% | 0.8 | 2 |
| K228N/K247N/N249S/R318Y/ | K63N/K82N/N84S/R150Y/R170E/ | 100.5 | n.d. | n.d. | 0.9 | 1 |
| R338E/R403E/E410N | R233E/E240N | | | | | |
| R318Y/R338E/R403E/E410N/ | R150Y/R170E/R233E/E240N/ | 55.0 | n.d. | n.d. | 1.7 | 1 |
| T412V | T242V | | | | | |
| R318Y/R338E/E410N/T412V | R150Y/R170E/E240N/T242V | 8.9 | n.d. | n.d. | 10.7 | 1 |
| R318Y/R338E/N346D/R403E/ | R150Y/R170E/N178D/R233E/ | 109.7 | 44.3 | 40% | 0.9 | 2 |
| E410N | E240N | | | | | |
| K247N/N249S/N260S | K82N/N84S/N95S | 147.0 | 60.8 | 41% | 0.6 | 2 |
| Y155F/K247N/N249S/N260S | Y[155]F/K82N/N84S/N95S | 167.0 | 97.7 | 58% | 0.6 | 2 |
| D104N/K106S/K247N/N249S/ | D[104]N/K[106]S/K82N/N84S/ | 330.0 | 319.6 | 97% | 0.3 | 2 |
| N260S | N95S | | | | | |
| D104N/K106S/Y155F/K247N/ | D[104]N/K[106]S/Y[155]F/K82N/ | 142.0 | 73.5 | 52% | 0.7 | 2 |
| N249S/N260S | N84S/N95S | | | | | |
| K247N/N249S/N260S/R318Y/ | K82N/N84S/N95S/R150Y/R170E/ | 65.0 | 10.8 | 17% | 1.5 | 2 |
| R338E/R403E/E410N | R233E/E240N | | | | | |
| R318Y/R338E/T343R/R403E/ | R150Y/R170E/T175R/R233E/ | 14.5 | 4.0 | 28% | 6.6 | 7 |
| E410N | E240N | | | | | |
| R338E/T343R | R170E/T175R | 3.4 | 0.6 | 18% | 28.0 | 2 |
| T343R/N346Y | T175R/N178Y | 38.6 | n.d. | n.d. | 2.5 | 1 |
| R318Y/R338E/N346Y/R403E/ | R150Y/R170E/N178Y/R233E/ | 39.6 | n.d. | n.d. | 2.4 | 1 |
| E410N | E240N | | | | | |
| R318Y/R338E/T343R/N346Y/ | R150Y/R170E/T175R/N178Y/ | 15.6 | 0.1 | 1% | 6.1 | 2 |
| R403E/E410N | R233E/E240N | | | | | |
| T343R/N346D | T175R/N178D | 78.4 | n.d. | n.d. | 1.2 | 1 |
| R318Y/R338E/T343R/N346D/ | R150Y/R170E/T175R/N178D/ | 76.2 | n.d. | n.d. | 1.3 | 1 |
| R403E/E410N | R233E/E240N | | | | | |
| R318Y/R338E/T343R/E410N | R150Y/R170E/T175R/E240N | 6.1 | n.d. | n.d. | 15.7 | 1 |
| Y155F/R318Y/R338E/T343R/ | Y[155]F/R150Y/R170E/T175R/ | 7.4 | n.d. | n.d. | 12.8 | 1 |
| E410N | E240N | | | | | |
| R318Y/T343R/R403E/E410N | R150Y/T175R/R233E/E240N | 84.1 | 17.8 | 21% | 1.1 | 2 |
| R338E/T343R/R403E/E410N | R170E/T175R/R233E/E240N | 29.4 | n.d. | n.d. | 3.2 | 1 |
| Y155F/R338E/T343R/R403E/ | Y[155]F/R170E/T175R/R233E/ | 28.5 | n.d. | n.d. | 3.3 | 1 |
| E410N | E240N | | | | | |
| Y155F/K247N/N249S/R318Y/ | Y[155]F/K82N/N84S/R150Y/ | 15.3 | 1.3 | 9% | 6.3 | 3 |
| R338E/T343R/R403E/E410N | R170E/T175R/R233E/E240N | | | | | |
| K228N/K247N/N249S/R318Y/ | K63N/K82N/N84S/R150Y/R170E/ | 29.1 | 0.3 | 1% | 3.3 | 2 |
| R338E/T343R/R403E/E410N | T175R/R233E/E240N | | | | | |
| Y155F/K228N/K247N/N249S/R318Y/ | Y[155]F/K63N/K82N/N84S/R150Y/ | 37.0 | 5.7 | 16% | 2.6 | 2 |
| R338E/T343R/R403E/E410N | R170E/T175R/R233E/E240N | | | | | |
| Y155F/R338E/T343R/R403E | Y[155]F/R170E/T175R/R233E | 72.1 | n.d. | n.d. | 1.3 | 1 |
| R338E/T343R/R403E | R170E/T175R/R233E | 55.0 | n.d. | n.d. | 1.7 | 1 |
| R318Y/R338E/T343R/R403E/ | R150Y/R170E/T175R/R233E/ | 23.2 | n.d. | n.d. | 4.1 | 1 |
| E410S | E240S | | | | | |
| Y155F/K247N/N249S/R338E/ | Y[155]F/K82N/N84S/R170E/ | 15.4 | n.d. | n.d. | 6.2 | 1 |
| T343R | T175R | | | | | |
| Y155F/K247N/N249S/R318Y/ | Y[155]F/K82N/N84S/R150Y/ | 13.9 | n.d. | n.d. | 6.9 | 1 |
| R338E/T343R/E410N | R170E/T175R/E240N | | | | | |
| Y155F/K247N/N249S/R338E/ | Y[155]F/K82N/N84S/R170E/ | 24.9 | n.d. | n.d. | 3.8 | 1 |
| E410N | E240N | | | | | |
| K247N/N249S/R338E/T343R/ | K82N/N84S/R170E/T175R/ | 14.0 | n.d. | n.d. | 6.8 | 1 |
| E410N | E240N | | | | | |
| Y155F/R318Y/R338E/T343R | Y[155]F/R150Y/R170E/T175R | 8.4 | n.d. | n.d. | 11.3 | 1 |
| R318Y/R338E/T343R | R150Y/R170E/T175R | 9.8 | n.d. | n.d. | 9.7 | 1 |
| Y155F/K247N/N249S/R318Y/ | Y[155]F/K82N/N84S/R150Y/ | 14.0 | n.d. | n.d. | 6.8 | 1 |
| R338E/T343R | R170E/T175R | | | | | |
| K247N/N249S/R318Y/R338E/ | K82N/N84S/R150Y/R170E/ | 14.7 | n.d. | n.d. | 6.5 | 1 |
| T343R | T175R | | | | | |
| Y155F/R338E/T343R/E410N | Y[155]F/R170E/T175R/E240N | 8.5 | n.d. | n.d. | 11.2 | 1 |
| R338E/T343R/E410N | R170E/T175R/E240N | 7.5 | n.d. | n.d. | 12.8 | 1 |
| Y155F/R318Y/T343R/E410N | Y[155]F/R150Y/T175R/E240N | 38.0 | n.d. | n.d. | 2.5 | 1 |
| K228N/R150Y/R338E/T343R/ | K63N/R150Y/R170E/T175R/ | 17.5 | n.d. | n.d. | 5.4 | 1 |
| R403E/E410N | R233E/E240N | | | | | |
| K228N/247N/N249S/R318Y/ | K63N/K82N/N84S/R150Y/R170E/ | 7.8 | n.d. | n.d. | 12.2 | 1 |
| R338E/T343R/E410N | T175R/E240N | | | | | |

### Example 9

### Determination of the Clotting Activities of FIX Variants in Hemophilia B Plasma

[0644] Clotting activities for FIX variants were determine by an activated partial thromboplastin time (aPTT) assay in human hemophilia B plasma from a single donor with <1% clotting activity (George King Bio-Medical, Inc., Overland Park, Kans.) per the manufacturer's instructions. Briefly, the aPTT assay involves the recalcification of plasma in the presence of a blend of purified phospholipids (platelet substitute) and activators (kaolin and sulphatide). The aPTT assay was performed using the Dapttin®TC aPTT reagent (Technoclone GmbH, Vienna, Austria) essentially as described in the manufacturers' product insert with FIX variants spiked into the hemophilia B plasma at final concentrations of 100 nM, 10 nM or 1 nM FIX variant. Briefly, FIX variants were diluted to 1 μM in 1× Buffer A (20 mM Hepes/150 mM NaCl/0.5% BSA, pH 7.4) based on the active site titrated zymogen concentration (Example 2). FIX variants were subsequently serially diluted to 100 nM, 10 nM and 1 nM directly into citrated human hemophilia B plasma (George King Bio-Medical). A 100 μL volume of each FIX dilution in plasma was mixed with 100 μL of the Dapttin®TC aPTT reagent and incubated at 37° C. for 180 seconds. Coagulation was initiated by the addition of 100 μL of 25 mM calcium (Diagnostica Stago, Asnieres, France). Coagulation time in seconds was measured using a STArt4 instrument (Diagnostica Stago, Asnieres, France). Each experiment represents the average of two independent clotting time measurements, which typically showed <5% CV.

[0645] Table 41 sets forth the clotting activities for each of the FIX variants assayed. Also assayed were recombinant wild-type FIX (termed Catalyst Biosciences WT; generated as described above in Example 1), and BeneFIX® (Coagulation Factor IX (Recombinant); Wyeth). Table 41 presents the results expressed as the time to clot at each of the three tested FIX concentrations; 100 nM, 10 nM and 1 nM, wherein each

[0646] FIX concentration represents ˜100%, ˜10% and −1% of the normal concentration of FIX in pooled normal plasma (PNP). Under identical assay conditions, 100% PNP shows a clotting time of 31.3±2.0 seconds, whereas clotting times for 10% and 1% dilutions of PNP in hemophilia B plasma are 42.7±1.7 and 55.0±4.7 seconds, respectively (n=4). The time to clot for the hemophilia B plasma used in these analyses was evaluated 83.2±9.2 seconds (n=5). A number of tested variants demonstrated clotting times similar to or slightly prolonged compared to the wild-type FIXa, where wild-type FIXa polypeptide used for comparison was the recombinant wild-type FIXa expressed from CHOX cells as a polypeptide with an amino acid sequence set forth in SEQ ID NO:3, as described in Example 1 (i.e. Catalyst Biosciences WT FIX polypeptide). On the other hand, several variants showed significantly shortened clotting times. Among this group of variants are FIXa-R318Y/R338E/T343R, FIXa-R318Y/R338E/E410N, FIXa-R338E/T343R/E410N, FIXa-R318Y/R338E/T343R/E410N, FIXa-K247N/N249S/R338E/T343R/E410N and FIXa-K228N/247N/N249S/R318Y/R338E/T343R/E410N.

TABLE 41
Clotting Activity (aPTT) of FIX Variants in Hemophilia B Plasma

| Mutation | Mutation | aPTT | | aPTT | | aPTT | | |
|---|---|---|---|---|---|---|---|---|
| (Mature FIX | (Chymotrypsin | (100 nM) | | (10 nM) | | (1.0 nM) | | |
| Numbering) | Numbering) | (s) | ±S.D. | (s) | ±S.D. | (s) | ±S.D. | n |
| BeneFIX ® | BeneFIX ® | 35.2 | n.d. | 47.4 | n.d. | 63.5 | n.d. | 1 |
| Coagulation | Coagulation | | | | | | | |
| FIX (T148A) | FIX (T[148]A) | | | | | | | |
| Catalyst | Catalyst | 35.5 | n.d. | 46.9 | n.d. | 60.6 | n.d. | 1 |
| Biosciences | Biosciences | | | | | | | |
| WT | WT | | | | | | | |
| T148A | T[148]A | 33.2 | n.d. | 43.1 | n.d. | 59.2 | n.d. | 1 |
| R338E/R403E | R170E/R233E | 34.3 | n.d. | 46.2 | n.d. | 58.8 | n.d. | 1 |
| R338E/R403E/ | R170E/R233E/ | 35.6 | n.d. | 46.6 | n.d. | 57.1 | n.d. | 1 |
| E410N | E240N | | | | | | | |
| Y155F/R338E/ | Y[155]F/R170E/ | 31.1 | n.d. | 41.2 | n.d. | 52.6 | n.d. | 1 |
| R403E/E410N | R233E/E240N | | | | | | | |
| R318Y/R338E/ | R150Y/R170E/ | 41.7 | n.d. | 52.7 | n.d. | 68.4 | n.d. | 1 |
| R403E | R233E | | | | | | | |
| Y155F/R318Y/ | Y[155]F/R150Y/ | 38.6 | n.d. | 48.6 | n.d. | 64.1 | n.d. | 1 |
| R338E/R403E | R170E/R233E | | | | | | | |
| R318Y/R338E/ | R150Y/R170E/ | 21.2 | n.d. | 24.8 | n.d. | 34.3 | n.d. | 1 |
| E410N | E240N | | | | | | | |
| D104N/K106S/ | D[104]N/K[106]S/ | 24.5 | n.d. | 30.8 | n.d. | 40.0 | n.d. | 1 |
| R318Y/R338E/ | R150Y/R170E/ | | | | | | | |
| E410N | E240N | | | | | | | |
| R318Y/R403E/ | R150Y/R233E/ | 46.1 | n.d. | 61.7 | n.d. | 78.3 | n.d. | 1 |
| E410N | E240N | | | | | | | |
| Y155F/R318Y/ | Y[155]F/R150Y/ | 42.3 | n.d. | 57.1 | n.d. | 74.5 | n.d. | 1 |
| R403E/E410N | R233E/E240N | | | | | | | |
| R318Y/R338E/ | R150Y/R170E/ | 25.4 | 1.2 | 33.0 | 2.1 | 43.0 | 1.1 | 3 |
| R403E/E410N | R233E/E240N | | | | | | | |
| T343R | T175R | 41.3 | 2.1 | 53.3 | 2.9 | 67.2 | 6.2 | 2 |
| T343R/Y345T | T175R/Y177T | 46.8 | 2.8 | 56.3 | 9.6 | 75.5 | 1.8 | 2 |
| R318Y/R338E | R150Y/R170E | 26.7 | n.d. | 31.5 | n.d. | 45.3 | n.d. | 1 |
| Y155F/K228N/ | Y[155]F/K63N/ | 35.6 | n.d. | 45.1 | n.d. | 60.1 | n.d. | 1 |
| R318Y/R338E/ | R150Y/R170E/ | | | | | | | |
| R403E/E410N | R233E/E240N | | | | | | | |
| D104N/K106S/ | D[104]N/K[106]S/ | 36.0 | n.d. | 46.8 | n.d. | 61.8 | n.d. | 1 |
| I251S/R318Y/ | I86S/R150Y/ | | | | | | | |
| R338E/R403E/ | R170E/R233E/ | | | | | | | |
| E410N | E240N | | | | | | | |
| I251S/R318Y/ | I86S/R150Y/ | 28.0 | n.d. | 30.1 | n.d. | 40.7 | n.d. | 1 |
| R338E/E410N | R170E/E240N | | | | | | | |
| D104N/K106S/ | D[104]N/K[106]S/ | 25.0 | n.d. | 31.0 | n.d. | 43.1 | n.d. | 1 |
| I251S/R318Y/ | I86S/R150Y/ | | | | | | | |
| R338E/E410N | R170E/E240N | | | | | | | |
| K247N/N249S/ | K82N/N84S/ | 33.7 | n.d. | 43.8 | n.d. | 58.4 | n.d. | 1 |
| R318Y/R338E/ | R150Y/R170E/ | | | | | | | |
| R403E/E410N | R233E/E240N | | | | | | | |
| Y155F/K247N/ | Y[155]F/K82N/ | 34.1 | n.d. | 46.2 | n.d. | 62.4 | n.d. | 1 |
| N249S/R318Y/ | N84S/R150Y/ | | | | | | | |
| R338E/R403E/ | R170E/R233E/ | | | | | | | |
| E410N | E240N | | | | | | | |
| A103N/N105S/ | A[103]N/N[105]S/ | 36.1 | n.d. | 48.1 | n.d. | 62.6 | n.d. | 1 |
| K247N/N249S/ | K82N/N84S/ | | | | | | | |
| R318Y/R338E/ | R150Y/R170E/ | | | | | | | |
| R403E/E410N | R233E/E240N | | | | | | | |
| D104N/K106S/ | D[104]N/K[106]S/ | 34.8 | n.d. | 45.6 | n.d. | 59.3 | n.d. | 1 |
| Y155F/K247N/ | Y[155]F/K82N/ | | | | | | | |
| N249S/R318Y/ | N84S/R150Y/ | | | | | | | |
| R338E/R403E/ | R170E/R233E/ | | | | | | | |
| E410N | E240N | | | | | | | |
| K247N/N249S/ | K82N/N84S/ | 26.1 | n.d. | 34.3 | n.d. | 44.7 | n.d. | 1 |
| R318Y/R338E/ | R150Y/R170E/ | | | | | | | |
| E410N | E240N | | | | | | | |
| Y155F/K247N/ | Y[155]F/K82N/ | 24.0 | n.d. | 29.2 | n.d. | 41.1 | n.d. | 1 |
| N249S/R318Y/ | N84S/R150Y/ | | | | | | | |
| R338E/E410N | R170E/E240N | | | | | | | |
| R318Y/R338E/ | R150Y/R170E/ | 26.9 | n.d. | 34.7 | n.d. | 47.0 | n.d. | 1 |
| R403E/E410S | R233E/E240S | | | | | | | |
| K228N/K247N/ | K63N/K82N/ | 44.4 | n.d. | 57.2 | n.d. | 70.2 | n.d. | 1 |
| N249S | N84S | | | | | | | |
| D104N/K106S/ | D[104]N/K[106]S/ | 46.9 | n.d. | 60.0 | n.d. | 73.6 | n.d. | 1 |
| Y155F/K228N/ | Y[155]F/K63N/ | | | | | | | |
| K247N/N249S | K82N/N84S | | | | | | | |
| K228N/K247N/ | K63N/K82N/ | 35.3 | 5.1 | 46.1 | 8.0 | 60.6 | 8.9 | 2 |
| N249S/R318Y/ | N84S/R150Y/ | | | | | | | |
| R338E/R403E/ | R170E/R233E/ | | | | | | | |
| E410N | E240N | | | | | | | |
| D104N/K106S/ | D[104]N/K[106]S/ | 38.4 | n.d. | 50.1 | n.d. | 67.1 | n.d. | 1 |
| K228N/K247N/ | K63N/K82N/ | | | | | | | |
| N249S/R318Y/ | N84S/R150Y/ | | | | | | | |
| R338E/R403E/ | R170E/R233E/ | | | | | | | |
| E410N | E240N | | | | | | | |
| Y155F/K228N/ | Y[155]F/K63N/ | 34.9 | n.d. | 44.7 | n.d. | 59.1 | n.d. | 1 |
| K247N/N249S/ | K82N/N84S/ | | | | | | | |
| R318Y/R338E/ | R150Y/R170E/ | | | | | | | |
| R403E/E410N | R233E/E240N | | | | | | | |
| R318Y/R338E/ | R150Y/R170E/ | 28.7 | n.d. | 37.6 | n.d. | 47.6 | n.d. | 1 |
| R403E/E410N/ | R233E/E240N/ | | | | | | | |
| T412V | T242V | | | | | | | |
| R318Y/R338E/ | R150Y/R170E/ | 30.5 | n.d. | 40.6 | n.d. | 52.8 | n.d. | 1 |
| R403E/E410N/ | R233E/E240N/ | | | | | | | |
| T412A | T242A | | | | | | | |
| R318Y/R338E/ | R150Y/R170E/ | 25.5 | n.d. | 30.7 | n.d. | 40.3 | n.d. | 1 |
| E410N/T412V | E240N/T242V | | | | | | | |
| R318Y/R338E/ | R150Y/R170E/ | 42.5 | n.d. | 54.2 | n.d. | 68.9 | n.d. | 1 |
| N346D/R403E/ | N178D/R233E/ | | | | | | | |
| E410N | E240N | | | | | | | |
| Y155F/R318Y/ | Y[155]F/R150Y/ | 37.8 | n.d. | 48.9 | n.d. | 65.2 | n.d. | 1 |
| R338E/N346D/ | R170E/N178D/ | | | | | | | |
| R403E/E410N | R233E/E240N | | | | | | | |
| K247N/N249S/ | K82N/N84S/ | 44.7 | n.d. | 56.9 | n.d. | 75.7 | n.d. | 1 |
| N260S/R318Y/ | N95S/R150Y/ | | | | | | | |
| R338E/R403E/ | R170E/R233E/ | | | | | | | |
| E410N | E240N | | | | | | | |
| Y155F/K247N/ | Y[155]F/K82N/ | 49.3 | n.d. | 59.6 | n.d. | 75.5 | n.d. | 1 |
| N249S/N260S/ | N84S/N95S/ | | | | | | | |
| R318Y/R338E/ | R150Y/R170E/ | | | | | | | |
| R403E/E410N | R233E/E240N | | | | | | | |
| R318Y/R338E/ | R150Y/R170E/ | 23.7 | 2.7 | 29.7 | 3.3 | 39.7 | 6.5 | 4 |
| T343R/R403E/ | T175R/R233E/ | | | | | | | |
| E410N | E240N | | | | | | | |
| Y155F/R318Y/ | Y[155]F/R150Y/ | 26.2 | 3.6 | 32.0 | 3.9 | 42.4 | 1.8 | 2 |
| R338E/T343R/ | R170E/T175R/ | | | | | | | |
| R403E/E410N | R233E/E240N | | | | | | | |
| D104N/K106S/ | D[104]N/K[106]S/ | 27.3 | n.d. | 34.9 | n.d. | 48.0 | n.d. | 1 |
| R318Y/R338E/ | R150Y/R170E/ | | | | | | | |
| T343R/R403E/ | T175R/R233E/ | | | | | | | |
| E410N | E240N | | | | | | | |
| R338E/T343R | R170E/T175R | 27.9 | n.d. | 33.8 | n.d. | 45.1 | n.d. | 1 |
| T343R/N346Y | T175R/N178Y | 40.8 | 3.8 | 54.9 | 0.8 | 74.9 | 2.2 | 2 |
| R318Y/R338E/ | R150Y/R170E/ | 28.8 | n.d. | 41.0 | n.d. | 54.4 | n.d. | 1 |
| N346Y/R403E/ | N178Y/R233E/ | | | | | | | |
| E410N | E240N | | | | | | | |
| R318Y/R338E/ | R150Y/R170E/ | 24.5 | n.d. | 32.5 | n.d. | 41.7 | n.d. | 1 |
| T343R/N346Y/ | T175R/N178Y/ | | | | | | | |
| R403E/E410N | R233E/E240N | | | | | | | |
| T343R/N346D | T175R/N178D | 39.9 | 1.4 | 51.3 | 4.8 | 65.0 | 4.1 | 2 |
| R318Y/R338E/ | R150Y/R170E/ | 34.8 | n.d. | 45.1 | n.d. | 57.9 | n.d. | 1 |
| T343R/N346D/ | T175R/N178D/ | | | | | | | |
| R403E/E410N | R233E/E240N | | | | | | | |
| R318Y/R338E/ | R150Y/R170E/ | 41.2 | n.d. | 47.9 | n.d. | 61.9 | n.d. | 1 |
| Y345A/R403E/ | Y177A/R233E/ | | | | | | | |
| E410N | E240N | | | | | | | |
| Y155F/K247N/ | Y[155]F/K82N/ | 40.2 | n.d. | 51.6 | n.d. | 62.2 | n.d. | 1 |
| N249S/R318Y/ | N84S/R150Y/ | | | | | | | |
| R338E/R403E | R170E/R233E | | | | | | | |
| K247N/N249S/ | K82N/N84S/ | 42.0 | n.d. | 55.6 | n.d. | 70.3 | n.d. | 1 |
| R318Y/R338E/ | R150Y/R170E/ | | | | | | | |
| R403E | R233E | | | | | | | |
| K247N/N249S/ | K82N/N84S/ | 44.6 | 3.0 | 57.2 | 4.2 | 71.5 | 6.1 | 3 |
| R318Y/R403E/ | R150Y/R233E/ | | | | | | | |
| E410N | E240N | | | | | | | |
| Y155F/K247N/ | Y[155]F/K82N/ | 31.0 | n.d. | 42.1 | n.d. | 55.6 | n.d. | 1 |
| N249S/R338E/ | N84S/R170E/ | | | | | | | |
| R403E/E410N | R233E/E240N | | | | | | | |
| K247N/N249S/ | K82N/N84S/ | 32.7 | n.d. | 42.2 | n.d. | 56.2 | n.d. | 1 |
| R338E/R403E/ | R170E/R233E/ | | | | | | | |
| E410N | E240N | | | | | | | |
| R318Y/R338E/ | R150Y/R170E/ | 30.1 | n.d. | 37.9 | n.d. | 51.4 | n.d. | 1 |
| T343R/R403E | T175R/R233E | | | | | | | |
| Y155F/R318Y/ | Y[155]F/R150Y/ | 32.0 | n.d. | 41.5 | n.d. | 53.7 | n.d. | 1 |
| R338E/T343R/ | R170E/T175R/ | | | | | | | |
| R403E | R233E | | | | | | | |
| R318Y/R338E/ | R150Y/R170E/ | 24.7 | 2.9 | 27.2 | 2.9 | 36.5 | 3.8 | 5 |
| T343R/E410N | T175R/E240N | | | | | | | |
| Y155F/R318Y/ | Y[155]F/R150Y/ | 25.9 | 2.1 | 28.8 | 3.5 | 38.5 | 4.2 | 2 |
| R338E/T343R/ | R170E/T175R/ | | | | | | | |
| E410N | E240N | | | | | | | |
| R318Y/T343R/ | R150Y/T175R/ | 31.7 | n.d. | 43.3 | n.d. | 60.7 | n.d. | 1 |
| R403E/E410N | R233E/E240N | | | | | | | |
| Y155F/R318Y/ | Y[155]F/R150Y/ | 40.3 | n.d. | 52.0 | n.d. | 68.7 | n.d. | 1 |
| T343R/R403E/ | T175R/R233E/ | | | | | | | |
| E410N | E240N | | | | | | | |
| R338E/T343R/ | R170E/T175R/ | 25.5 | n.d. | 30.4 | n.d. | 41.9 | n.d. | 1 |
| R403E/E410N | R233E/E240N | | | | | | | |
| Y155F/R338E/ | Y[155]F/R170E/ | 27.5 | n.d. | 33.3 | n.d. | 42.3 | n.d. | 1 |
| T343R/R403E/ | T175R/R233E/ | | | | | | | |
| E410N | E240N | | | | | | | |
| Y155F/K247N/ | Y[155]F/K82N/ | 24.2 | 0.9 | 29.7 | 1.4 | 40.5 | 2.4 | 5 |
| N249S/R318Y/ | N84S/R150Y/ | | | | | | | |
| R338E/T343R/ | R170E/T175R/ | | | | | | | |
| R403E/E410N | R233E/E240N | | | | | | | |
| K247N/N249S/ | K82N/N84S/ | 28.7 | n.d. | 36.2 | n.d. | 50.2 | n.d. | 1 |
| R318Y/R338E/ | R150Y/R170E/ | | | | | | | |
| T343R/R403E/ | T175R/R233E/ | | | | | | | |
| E410N | E240N | | | | | | | |
| K228N/I251S/ | K63N/I86S/ | 34.5 | n.d. | 44.9 | n.d. | 58.2 | n.d. | 1 |
| R318Y/R338E/ | R150Y/R170E/ | | | | | | | |
| R403E/E410N | R233E/E240N | | | | | | | |
| Y155F/K228N/ | Y[155]F/K63N/ | 34.5 | n.d. | 46.5 | n.d. | 60.3 | n.d. | 1 |
| I251S/R318Y/ | I86S/R150Y/ | | | | | | | |
| R338E/R403E/ | R170E/R233E/ | | | | | | | |
| E410N | E240N | | | | | | | |
| N260S/R318Y/ | N95S/R150Y/ | 31.4 | n.d. | 41.1 | n.d. | 55.4 | n.d. | 1 |
| R338E/T343R/ | R170E/T175R/ | | | | | | | |
| R403E/E410N | R233E/E240N | | | | | | | |
| Y155F/N260S/ | Y[155]F/N95S/ | 35.3 | 0.6 | 45.3 | 2.5 | 59.1 | 3.2 | 2 |
| R318Y/R338E/ | R150Y/R170E/ | | | | | | | |
| T343R/R403E/ | T175R/R233E/ | | | | | | | |
| E410N | E240N | | | | | | | |
| K228N/K247N/ | K63N/K82N/ | 28.0 | 2.0 | 35.5 | 3.9 | 47.7 | 6.0 | 8 |
| N249S/R318Y/ | N84S/R150Y/ | | | | | | | |
| R338E/T343R/ | R170E/T175R/ | | | | | | | |
| R403E/E410N | R233E/E240N | | | | | | | |
| Y155F/K228N/ | Y[155]F/K63N/ | 30.7 | 2.3 | 40.6 | 2.0 | 53.5 | 2.5 | 2 |
| K247N/N249S/ | K82N/N84S/ | | | | | | | |
| R318Y/R338E/ | R150Y/R170E/ | | | | | | | |
| T343R/R403E/ | T175R/R233E/ | | | | | | | |
| E410N | E240N | | | | | | | |
| Y155F/R338E/ | Y[155]F/R170E/ | 29.8 | n.d. | 37.9 | n.d. | 50.1 | n.d. | 1 |
| T343R/R403E | T175R/R233E | | | | | | | |
| R338E/T343R/ | R170E/T175R/ | 29.4 | n.d. | 37.0 | n.d. | 49.8 | n.d. | 1 |
| R403E | R233E | | | | | | | |
| Y155F/R338E/ | Y[155]F/R170E/ | 28.3 | n.d. | 33.3 | n.d. | 44.4 | n.d. | 1 |
| T343R/R403E/ | T175R/R233E/ | | | | | | | |
| E410S | E240S | | | | | | | |
| Y155F/N260S/ | Y[155]F/N95S/ | 40.5 | n.d. | 52.9 | n.d. | 70.1 | n.d. | 1 |
| R338E/T343R/ | R170E/T175R/ | | | | | | | |
| R403E | R233E | | | | | | | |
| Y155F/I251S/ | Y[155]F/I86S/ | 31.9 | n.d. | 40.1 | n.d. | 54.5 | n.d. | 1 |
| R338E/T343R/ | R170E/T175R/ | | | | | | | |
| R403E | R233E | | | | | | | |
| R318Y/R338E/ | R150Y/R170E/ | 27.4 | n.d. | 34.0 | n.d. | 43.3 | n.d. | 1 |
| T343R/R403E/ | T175R/R233E/ | | | | | | | |
| E410S | E240S | | | | | | | |
| Y155F/K247N/ | Y[155]F/K82N/ | 43.2 | n.d. | 58.6 | n.d. | 74.2 | n.d. | 1 |
| N249S/T343R/ | N84S/T175R/ | | | | | | | |
| R403E | R233E | | | | | | | |
| Y155F/K247N/ | Y[155]F/K82N/ | 32.5 | n.d. | 41.4 | n.d. | 55.4 | n.d. | 1 |
| N249S/R318Y/ | N84S/R150Y/ | | | | | | | |
| R338E/T343R/ | R170E/T175R/ | | | | | | | |
| R403E | R233E | | | | | | | |
| K247N/N249S/ | K82N/N84S/ | 30.8 | 4.2 | 39.1 | 6.9 | 52.5 | 9.1 | 2 |
| R318Y/R338E/ | R150Y/R170E/ | | | | | | | |
| T343R/R403E | T175R/R233E | | | | | | | |
| Y155F/K247N/ | Y[155]F/K82N/ | 27.3 | n.d. | 34.9 | n.d. | 47.7 | n.d. | 1 |
| N249S/R338E/ | N84S/R170E/ | | | | | | | |
| T343R/R403E/ | T175R/R233E/ | | | | | | | |
| E410N | E240N | | | | | | | |
| K247N/N249S/ | K82N/N84S/ | 28.2 | n.d. | 35.1 | n.d. | 47.3 | n.d. | 1 |
| R338E/T343R/ | R170E/T175R/ | | | | | | | |
| R403E/E410N | R233E/E240N | | | | | | | |
| Y155F/K247N/ | Y[155]F/K82N/ | 29.6 | n.d. | 37.4 | n.d. | 48.7 | n.d. | 1 |
| N249S/R318Y/ | N84S/R150Y/ | | | | | | | |
| R338E | R170E | | | | | | | |
| Y155F/K247N/ | Y[155]F/K82N/ | 39.6 | n.d. | 49.7 | n.d. | 65.0 | n.d. | 1 |
| N249S/R318Y/ | N84S/R150Y/ | | | | | | | |
| T343R | T175R | | | | | | | |
| Y155F/K247N/ | Y[155]F/K82N/ | 52.2 | n.d. | 67.9 | n.d. | 79.9 | n.d. | 1 |
| N249S/R318Y/ | N84S/R150Y/ | | | | | | | |
| R403E | R233E | | | | | | | |
| Y155F/K247N/ | Y[155]F/K82N/ | 32.9 | n.d. | 43.8 | n.d. | 55.8 | n.d. | 1 |
| N249S/R318Y/ | N84S/R150Y/ | | | | | | | |
| E410N | E240N | | | | | | | |
| Y155F/K247N/ | Y[155]F/K82N/ | 39.2 | n.d. | 50.4 | n.d. | 62.6 | n.d. | 1 |
| N249S/R338E/ | N84S/R170E/ | | | | | | | |
| R403E | R233E | | | | | | | |
| Y155F/K247N/ | Y[155]F/K82N/ | 27.4 | n.d. | 31.5 | n.d. | 41.8 | n.d. | 1 |
| N249S/R338E/ | N84S/R170E/ | | | | | | | |
| T343R | T175R | | | | | | | |
| Y155F/K247N/ | Y[155]F/K82N/ | 28.7 | 0.4 | 32.7 | 0.1 | 41.8 | 0.9 | 2 |
| N249S/R318Y/ | N84S/R150Y/ | | | | | | | |
| R338E/T343R/ | R170E/T175R/ | | | | | | | |
| E410N | E240N | | | | | | | |
| K247N/N249S/ | K82N/N84S/ | 28.0 | 0.8 | 32.7 | 0.8 | 42.4 | 0.3 | 2 |
| R318Y/R338E/ | R150Y/R170E/ | | | | | | | |
| T343R/E410N | T175R/E240N | | | | | | | |
| Y155F/K247N/ | Y[155]F/K82N/ | 38.9 | n.d. | 50.4 | n.d. | 65.5 | n.d. | 1 |
| N249S/R318Y/ | N84S/R150Y/ | | | | | | | |
| T343R/R403E/ | T175R/R233E/ | | | | | | | |
| E410N | E240N | | | | | | | |
| K247N/N249S/ | K82N/N84S/ | 35.9 | 4.2 | 46.6 | 6.0 | 60.9 | 7.8 | 2 |
| R318Y/T343R/ | R150Y/T175R/ | | | | | | | |
| R403E/E410N | R233E/E240N | | | | | | | |
| Y155F/K247N/ | Y[155]F/K82N/ | 27.1 | 1.9 | 31.8 | 2.0 | 41.2 | 0.8 | 2 |
| N249S/R338E/ | N84S/R170E/ | | | | | | | |
| E410N | E240N | | | | | | | |
| Y155F/K247N/ | Y[155]F/K82N/ | 44.3 | n.d. | 60.7 | n.d. | 75.5 | n.d. | 1 |
| N249S/R318Y/ | N84S/R150Y/ | | | | | | | |
| T343R/R403E | T175R/R233E | | | | | | | |
| K247N/N249S/ | K82N/N84S/ | 45.3 | n.d. | 57.5 | n.d. | 75.7 | n.d. | 1 |
| R318Y/T343R/ | R150Y/T175R/ | | | | | | | |
| R403E | R233E | | | | | | | |
| Y155F/K247N/ | Y[155]F/K82N/ | 44.9 | 0.1 | 52.5 | 3.7 | 64.9 | 0.5 | 2 |
| N249S/R318Y/ | N84S/R150Y/ | | | | | | | |
| T343R/E410N | T175R/E240N | | | | | | | |
| K247N/N249S/ | K82N/N84S/ | 42.7 | n.d. | 50.2 | n.d. | 64.6 | n.d. | 1 |
| R318Y/T343R/ | R150Y/T175R/ | | | | | | | |
| E410N | E240N | | | | | | | |
| Y155F/K247N/ | Y[155]F/K82N/ | 31.1 | n.d. | 40.9 | n.d. | 56.2 | n.d. | 1 |
| N249S/R338E/ | N84S/R170E/ | | | | | | | |
| T343R/R403E | T175R/R233E | | | | | | | |
| K247N/N249S/ | K82N/N84S/ | 32.0 | n.d. | 43.2 | n.d. | 56.1 | n.d. | 1 |
| R338E/T343R/ | R170E/T175R/ | | | | | | | |
| R403E | R233E | | | | | | | |
| Y155F/K247N/ | Y[155]F/K82N/ | 28.5 | n.d. | 32.2 | n.d. | 45.9 | n.d. | 1 |
| N249S/R338E/ | N84S/R170E/ | | | | | | | |
| T343R/E410N | T175R/E240N | | | | | | | |
| K247N/N249S/ | K82N/N84S/ | 25.1 | 3.9 | 29.9 | 5.0 | 41.1 | 8.0 | 2 |
| R338E/T343R/ | R170E/T175R/ | | | | | | | |
| E410N | E240N | | | | | | | |
| Y155F/K247N/ | Y[155]F/K82N/ | 36.7 | n.d. | 49.3 | n.d. | 65.4 | n.d. | 1 |
| N249S/T343R/ | N84S/T175R/ | | | | | | | |
| R403E/E410N | R233E/E240N | | | | | | | |
| Y155F/R318Y/ | Y[155]F/R150Y/ | 27.4 | 1.0 | 31.4 | 1.7 | 40.7 | 0.4 | 2 |
| R338E/T343R | R170E/T175R | | | | | | | |
| R318Y/R338E/ | R150Y/R170E/ | 20.5 | n.d. | 24.3 | n.d. | 32.2 | n.d. | 1 |
| T343R | T175R | | | | | | | |
| Y155F/R318Y/ | Y[155]F/R150Y/ | 43.4 | n.d. | 56.1 | n.d. | 71.3 | n.d. | 1 |
| T343R/R403E | T175R/R233E | | | | | | | |
| Y155F/T343R/ | Y[155]F/T175R/ | 36.1 | n.d. | 47.5 | n.d. | 63.0 | n.d. | 1 |
| R403E/E410N | R233E/E240N | | | | | | | |
| Y155F/K247N/ | Y[155]F/K82N/ | 28.0 | 1.4 | 32.9 | 0.8 | 42.6 | 0.4 | 2 |
| N249S/R318Y/ | N84S/R150Y/ | | | | | | | |
| R338E/T343R | R170E/T175R | | | | | | | |
| K247N/N249S/ | K82N/N84S/ | 27.4 | 1.2 | 32.7 | 0.2 | 42.4 | 3.1 | 2 |
| R318Y/R338E/ | R150Y/R170E/ | | | | | | | |
| T343R | T175R | | | | | | | |
| Y155F/K247N/ | Y[155]F/K82N/ | 36.2 | 4.5 | 44.8 | 5.9 | 54.4 | 4.2 | 5 |
| N249S/T343R/ | N84S/T175R/ | | | | | | | |
| E410N | E240N | | | | | | | |
| Y155F/K247N/ | Y[155]F/K82N/ | 47.2 | n.d. | 60.7 | n.d. | 74.2 | n.d. | 1 |
| N249S/R403E/ | N84S/R233E/ | | | | | | | |
| E410N | E240N | | | | | | | |
| Y155F/R338E/ | Y[155]F/R170E/ | 24.9 | 4.4 | 27.5 | 4.4 | 34.9 | 4.4 | 4 |
| T343R/E410N | T175R/E240N | | | | | | | |
| R338E/T343R/ | R170E/T175R/ | 19.8 | n.d. | 23.9 | n.d. | 34.7 | n.d. | 1 |
| E410N | E240N | | | | | | | |
| Y155F/R318Y/ | Y[155]F/R150Y/ | 41.3 | 5.7 | 49.5 | 6.0 | 63.4 | 6.0 | 2 |
| T343R/E410N | T175R/E240N | | | | | | | |
| R318Y/T343R/ | R150Y/T175R/ | 34.5 | n.d. | 44.8 | n.d. | 61.0 | n.d. | 1 |
| E410N | E240N | | | | | | | |
| K228N/R318Y/ | K63N/R150Y/ | 23.4 | n.d. | 28.8 | n.d. | 38.9 | n.d. | 1 |
| R338E/T343R/ | R170E/T175R/ | | | | | | | |
| R403E/E410N | R233E/E240N | | | | | | | |
| K228N/K247N/ | K63N/K82N/ | 28.6 | n.d. | 37.3 | n.d. | 47.9 | n.d. | 1 |
| N249S/R318Y/ | N84S/R150Y/ | | | | | | | |
| R338E/T343R/ | R170E/T175R/ | | | | | | | |
| R403E | R233E | | | | | | | |
| K228N/247N/ | K63N/K82N/ | 21.4 | n.d. | 25.8 | n.d. | 34.3 | n.d. | 1 |
| N249S/R318Y/ | N84S/R150Y/ | | | | | | | |
| R338E/T343R/ | R170E/T175R/ | | | | | | | |
| E410N | E240N | | | | | | | |
| K228N/K247N/ | K63N/K82N/ | 35.4 | n.d. | 44.0 | n.d. | 61.4 | n.d. | 1 |
| N249S/R318Y/ | N84S/R150Y/ | | | | | | | |
| T343R/R403E/ | T175R/R233E/ | | | | | | | |
| E410N | E240N | | | | | | | |

### Example 10

### A. AAV Capsid Selection

[0647] Capsid libraries, containing barcodes for tracking and identification, were generated, and library diversity was validated by DNA sequencing. Unique barcodes were used to track variant enrichment over passage rounds via high-throughput sequencing (HTS) using three methods: high throughput sequencing of the barcodes using a MiSeq sequencer (Illumina); standard PacBio real-time sequencing (Pacbio) of the capsids including the barcodes; and Sanger sequencing of the capsids including the barcodes. Capsid genes from various AAV wild-type serotypes and previously described variants were shuffled using DNase shuffling to create highly complex and functional capsid libraries (see, e.g., Stemmer (1994) Proc. Natl. Acad. Sci. U.S.A. 91:10747-10751). Capsid variants that demonstrated improved transduction efficiency in human islet cells were selected. Details of the generation and selection of the capsid proteins are described in International PCT application No. PCT/US2019/025026, published as WO2019/191701.

### B. AAV Capsid Transduction Efficiency in Liver

[0648] Transduction efficiency of each of the rAAVs packaged with the variant capsids (e.g., capsids whose protein and encoding nucleic acid sequences are set forth in SEQ ID NOs: 418-423) also was assessed in vivo. Balb/C SCID mice were injected in the tail vein with 2 E+10 viral genomes (vgs) of a luciferase rAAV vector packaged with the new variant capsids set forth in SEQ ID NOS: 418-423, and previously characterized capsids AAV8 and AAV-DJ (sold by CellBiolabs, Inc.; SEQ ID NOs: 424-427) which show tropism for the liver. The results show that for all capsid variants tested, the majority of the AAV capsids targeted to the liver, as assessed by live imaging for luciferase. Luciferase expression also was analyzed in several mouse organs, post-mortem, thirty-four days after injection. The results show that luciferase was expressed highest in liver compared to other organs. Vector genomes were quantified in the organs using qPCR. Vector genome copies above background were detected only for liver samples. Mice injected with the capsid variant, whose protein and nucleic acid sequence is set forth in SEQ ID NOs: 418 and 421(KP1), respectively, contained higher vector copy numbers than the mice that had received the previously characterized AAV-DJ packaged vector (nucleic acid and protein sequences of the capsid set forth in SEQ ID NOs:424 and 425, respectively) and AAV-8 packaged vector. Mice injected with the capsid variant, designated KP-3, whose amino acid and nucleic acid sequences are set forth in SEQ ID NOs:420 and 423, respectively, had significantly more vector genomes (vgs) in their livers than AAV-8 injected mice, and had similar levels to the DJ injected mice. Mice injected with the capsid variant, designated KP-2, whose amino acid and nucleic acid sequences are set forth in SEQ ID NO: 419 and SEQ ID NO:422, respectively, had similar levels of rAAV genomes as AAV8 injected mice and fewer than DJ injected mice.

[0649] Transduction efficiency of hepatocytes with rAAV packaged with the capsid, designated KP1 (SEQ ID NOs: 418 and 421) was assessed in xenograft liver models. AAV-KP1 transduced human and mouse hepatocytes at higher levels than the AAV-DJ (SEQ ID NOs:424 and 425). Capsid variants that demonstrated improved transduction efficiency of hepatocytes for rodents and humans and in vivo in the liver are those packaged in the capsids designated KP1, KP2, and KP3, whose nucleic acid and protein sequences are set forth in SEQ ID NOs:418-423. Each of the capsids were analyzed to determine the prevalence of various serotypes in the sequence. The results show that the capsid KP1 (SEQ ID NOs:418 and 421) contains fragments from 7 of the 8 parental serotypes, and the capsids designated KP2 and KP3 (SEQ ID NOs:419, 420, 422, and 423) contain fragments from 6 parental serotypes. The capsid designated KP1 contains stretches of several different parental sequences at the N-terminus, while the capsids designated KP2 and KP3 each contain a less diverse N-terminus. The capsids designated KP1 and KP3 are enriched for AAV2 in the N-terminus, and share common residues from AAV8 at the C-terminus. In each of the capsids designated KP1, KP2 and KP3, most of the C-terminus was derived from AAV3B. KP1 and KP3 share 92% overall sequence identity with AAV3B; KP3 shares 95% overall amino acid sequence identity with AAV3B. All three of these capsids share residues that are unique to AAV1 and AAV6 in the sequence stretch between amino acids 225 and 267, and all contain arginine at position 597, which was previously characterized as a heparin sulfate proteoglycan binding site (Lerch et al. (2012) Virology 423:6-13). Table 42, below, summarizes shared residues among these capsids that exhibit the improved transduction of hepatocytes. The table shows shared amino acid residues among AAV capsid variants designated KP1, KP2 and KP3. Numbering of residues of AAV3B, KP1, KP2, and KP3 is with reference to alignment with SEQ ID NO:418 (KP1). Shown are residues that are different from AAV3B and that are shared among at least two of the variants shown. Amino acids shared among all three variant capsids are highlighted in bold. A blank field indicates a residue identical to that of AAV3B. A missing amino acid is indicated (-). HVAR is the hypervariable region. Surface exposed residues on the VP3 capsid protein are marked (*)

TABLE 42

| Position | Capsid protein/HVAR | AAV3B | KP1 | KP2 | KP3 |
|---|---|---|---|---|---|
| 14 | VP1 | N | T | | T |
| 21 | VP1 | E | Q | | Q |
| 24 | VP1 | A | K | D | K |
| 29 | VP1 | V | P | A | P |
| 31 | VP1 | Q | P | K | P |
| 34 | VP1 | A | P | | P |
| 35 | VP1 | N | A | | A |
| 36 | VP1 | Q | E | | E |
| 37 | VP1 | Q | R | | R |
| 39 | VP1 | Q | K | | K |
| 41 | VP1 | N | D | D | D |
| 42 | VP1 | R | S | G | S |
| 56 | VP1 | G | | F | F |
| 67 | VP1 | E | A | A | |
| 92 | VP1 | K | R | R | R |
| 125 | VP1 | I | V | V | V |
| 135 | VP1 | A | P | G | G |
| 147 | VP1, VP2 | D | E | E | E |
| 148 | VP1, VP2 | Q | H | H | P |
| 151 | VP1, VP2 | Q | V | V | |
| 159 | VP1, VP2 | V | T | I | I |
| 164 | VP1, VP2 | K | Q | Q | Q |
| 180 | VP1, VP2 | E | D | D | |
| 196 | VP1, VP2 | T | S | S | S |
| 197 | VP1, VP2 | S | G | G | G |
| 200 | VP1, VP2 | S | T | T | P |
| 205 | VP1, VP2, VP3 | S | A | T | A |
| 224 | VP1, VP2, VP3 | S | A | A | A |
| 233 | VP1, VP2, VP3 | Q | T | T | T |
| 263* | VP1, VP2, VP3 (HVR I) | Q | A | A | A |
| 265* | VP1, VP2, VP3 (HVR I) | — | T | T | T |
| 311 | VP1, VP2, VP3 | K | R | R | R |
| 313 | VP1, VP2, VP3 | S | N | N | N |
| 327* | VP1, VP2, VP3 (HVR II) | D | E | E | E |
| 331* | VP1, VP2, VP3 (HVR II) | T | K | | K |
| 373 | VP1, VP2, VP3 | V | I | I | I |
| 649 | VP1, VP2, VP3 | M | L | | L |
| 658* | VP1, VP2, VP3 | N | D | | D |
| 664* | VP1, VP2, VP3 | S | N | | N |
| 668* | VP1, VP2, VP3 | F | L | | L |
| 669* | VP1, VP2, VP3 | A | N | | N |
| 707* | VP1, VP2, VP3 (HVR IX) | N | Y | | Y |
| 710* | VP1, VP2, VP3 (HVR IX) | V | T | | T |
| 711* | VP1, VP2, VP3 (HVR IX) | N | S | | S |
| 715* | VP1, VP2, VP3 (HVR IX) | T | A | | A |
| 717* | VP1, VP2, VP3 (HVR IX) | D | N | | N |
| 719* | VP1, VP2, VP3 (HVR IX) | N | E | | E |

### Example 11

### rAAV-Modified FIX (Designated CB2679) Vector Construction, Production and Titration

[0650] In all examples, except where noted, the mature form of this FIX has the sequence set forth in SEQ ID NO:394. Where noted, the replacements are in a FIX allele with T148A (SEQ ID NO:490). The amino acid sequence of the mature form of FIX encoded by the wild-type allele with the T148A replacement is set forth in SEQ ID NO:20 and also SEQ ID NO:489. The nucleic acid sequence of the modified mature FIX allele is set forth in SEQ ID NO:486. The T148A replacement does not alter activity of FIX or modified FIX. The activities of these the modified FIX polypeptides are substantially the same.

### A. Cloning of the FIX Gene

[0651] The nucleic acid encoding the 461 amino acid wild-type FIX precursor polypeptide (set forth in SEQ ID NO: 2) with a portion of the first FIX intron (nucleotides 2691..4128 of SEQ ID NO: 451; collectively the FIX “minigene” or FIX-GT, for FIX Gene Therapy) cloned immediately downstream of the first amino acid following the FIX signal sequence was cloned into the rAAV vector (set forth in SEQ ID NO:555). The rAAV vector contains an apolipoprotein E locus control region (ApoE-HCR) enhancer (set forth in SEQ ID NO: 438), the human Serpin A alpha-1 antitrypsin liver specific promoter (hAAT) (set forth in SEQ ID NO: 440), and a bovine growth hormone polyA (pA; set forth in SEQ ID NO: 443) (see, FIG. 10). Viral DNA packaging sequences (inverted terminal repeats [ITRs]) flank the enhancer-promoter-FIX-pA cassette.

[0652] Site-directed mutagenesis generated the Padua FIX, which contains the R338L mutation (SEQ ID NO: 484), and the modified FIX containing the R318Y, R338E and T343R mutations (SEQ ID NO:394 or 490 (T148A allele)) using the QuikChange II kit according to manufacturer's instructions. In these examples modified FIX refers to the variant that contains the replacements R318Y/R338E/T343R. The complete sequence of the rAAV vector containing wild-type hFIX, modified hFIX, and Padua FIX are set forth in SEQ IDS NOs: 447, 448 and 449, respectively. Additional vectors containing wild-type hFIX, modified hFIX, and Padua FIX are set forth in SEQ IDS NOs: 450-455.

[0653] The hFIX minigene encodes a FIX precursor protein that contains a 28 amino acid signal peptide (nucleotides 2604-2687 of any of SEQ ID NOs: 447, 448 and 449; or nucleotides 1-84 of SEQ ID NO: 1) followed by an 18 amino acid propeptide (nucleotides 2688-2690 and 4129-4179 of any of SEQ ID NOs: 447, 448 and 449; or nucleotides 85-138 of SEQ ID NO: 1), and the 415 amino acid mature human factor IX zymogen (nucleotides 4180-5427 of any of SEQ ID NOs: 447, 448 and 449; or nucleotides 139-1383 of SEQ ID NO: 1). The FIX mini-intron (1438 bp spanning nucleotides 2691-4128 of any of SEQ ID NOs: 447, 448 and 449) is inserted after the first codon of the propeptide, and before the second codon (e.g., immediately after nucleotide 87 of SEQ ID NO: 1); it is spliced out upon functional expression. The FIX mini-intron increases transgene expression by 10-fold when used in mouse liver (see, e.g., Kurachi et al. J. Biol. Chem 270(10):5276-5281 (1995)). With a total size of 4.4 kb including the ITRs, the vector is well within the range that can be efficiently packaged in an AAV capsid.

B. rAAV Vector Production

[0654] rAAV vectors (SEQ ID NOs: 447, 449 and 448), prepared as detailed above, respectively encoding wild-type FIX (mature sequence set forth SEQ ID NO: 3), Padua FIX (mature sequence set forth in SEQ ID NO:484), and another exemplary modified human FIX (mature sequence set forth in SEQ ID NO:394, designated CB2679 elsewhere herein, and referred to below as modified FIX), packaged with the capsid designated KP1, were generated using triple plasmid calcium phosphate transfection (large scale preparation) or Polyethylenimine (PEI) (small scale preparation) transfection protocol of HEK-293T/17 cells. rAAV was purified from the cell lysates by two rounds of cesium chloride (CsCl) gradient ultracentrifugation purification (see e.g., Grimm et al, J. of Virology 80(1):426-439 (2006); Pekrun et al., JCI insight 4(22):e131610 (2019)).

[0655] For large-scale production, HEK-293T cells (ATCC #CRL-3216, Manassas, Va.) were seeded and expanded for 2 days prior to transfection in T225 flasks (Corning Inc., Corning, N.Y.) using 40×225 cm² flasks for each prep. The cells were then transfected using a standard calcium phosphate-based protocol or with DNA-OptiMEM-PEI mixture (Polyethylenimine, linear MW 25000, transfection grade, PEI 25K, Polysciences, Inc., #23966-1, Warrington, Pa.) with 75 μg of plasmid DNA per flask, consisting of an equimolar mixture of: a) hFIX-encoding rAAV vector plasmid encoding the modified FIX (mature sequence set forth in SEQ ID NO:394), Padua FIX (mature sequence set forth in SEQ ID NO:484), or wild type FIX (mature sequence set forth in SEQ ID NO:3), b) AAV serotype-specific packaging plasmid (e.g., SEQ ID NO:430), and c) an adenoviral helper plasmid (adenovirus type 5 (pAd5); see e.g., Vandendriessche et al. (2007) J. Throm. Haem. 5:16-24; Chuah et al., (2014) J. Am. Soc. Gene Ther. 22:1605-1613). After 3 days of incubation, cells were released by the addition of 0.5 mL 500 mM EDTA per flask and crude AAV particle extracts were prepared by freezing and thawing cells for 3-4 times at −80° C. to liberate the virus particles from the HEK-293T cells.

[0656] Cells were then digested for 1 hour at 37° C. with 200 U/mL Benzonase® enzyme digestion buffer (EMD Chemicals, Fisher #NC0544951, Waltham, Mass.) to remove non-encapsidated single stranded (ss) and double stranded (ds) DNA and RNA and/or DNA and RNA leaking from broken virus particles. Then, 25 mM CaCl₂) was added to precipitate debris, and supernatants were treated with PEG 8000 (Fisher, M6510, Waltham, Mass.) buffered with 2.5M NaCl to pellet the virus.

[0657] All resulting rAAV preparations were processed identically using two rounds of ultrapure optical grade cesium chloride (CsCl, Invitrogen #15507-023, Waltham, Mass.) gradient centrifugation, followed by dialysis using slide-A-Lyzer G2 dialysis cassettes (MWCO 10,000) (Pierce #87730, Waltham, Mass.) according to manufacture instructions for removal of CsCl and particle concentration. Final viral preparations were collected and frozen and stored at −80° C. in phosphate-buffered saline (PBS) containing 5% D-Sorbitol (Sigma #S6021, St. Louis, Mo.).

C. rAAV Titration

[0658] Titration of AAV was performed by qPCR using the Real-Time PCR System (Applied Biosystems StepOnePlus, Waltham, Mass.). DNA was extracted using the QIAamp MinElute Virus Spin Kit (Qiagen Cat #57704, Germantown, Md.) according to the manufacturer's instructions. Linearized and purified inverted terminal repeat (ITR) vector containing a sequence in the AAV of known concentration was used as a standard for titration. Serial dilutions of the genomic DNA (gDNA) isolated from purified virus was amplified using forward and reverse primers for Factor IX (Forward: ATCTACAACAACATGTTCTGCG SEQ ID NO: 556 Reverse: CTGATGATGCCGGTCAGAAA SEQ ID NO: 557) using a PCR program set to the following cycle times: 95° C. 10 minute, 40 cycles at 95° C. for 15 seconds and 60° C. for 1 minute. Titer was then assessed by quantitative dot blot and calculated based on a standard curve.

### D. FIX Codon Optimization

[0659] As applicable, FIX DNA sequences were codon optimized for mammalian expression using murine preferences or human preferences using the Geneious Prime software tool. For example, for expressing human wild-type FIX or FIX variants in mouse cell lines or in vivo in mice, the human FIX gene was codon optimized for mouse using the Thermo Scientific GeneArt website tool as previously described (see e.g., Barzel et al. (2015) Nature 517:360-364). In some examples, the human wild-type or FIX variants are codon optimized for mouse and are used for expressing FIX in non-mouse cells, such as human cells or non-human primate cells or animals. In another example, human wild-type FIX or FIX variants for expression in human cells or tissue were codon optimized for human. For example, to codon optimize for human cell line expression, sequences were optimized utilizing ‘standard’ source genetic code, Homo sapiens as the target organism, ‘standard’ target genetic code, and thresholds were set up to be rare (i.e., at thresholds of 0.5, 0.8 and 1.0). The nucleic acid molecules encoding the three FIX polypeptides: wild-type FIX (SEQ ID NO: 3), Padua FIX (SEQ ID NO: 484), and exemplary modified FIX (SEQ ID NO:394), were codon optimized for human expression. As noted above, the sequences with the optimized human codons are very similar (greater than 90% sequence identity). In some examples, the CpG (or CG) islands are removed, such as for optimizing coding sequences for increased expression. In these examples, examples of codon-optimized wild-type FIX, modified FIX (CB2679), and Padua FIX, are set forth in SEQ ID NOs:518-553. Table 43, below, describes the sequences. A sequence alignment comparing wild-type FIX, modified FIX and Padua FIX (frame 1) at thresholds of 0.5, 0.8 and 1.0 is set forth in FIGS. 8A-B and FIGS. 9A-D.

TABLE 43
Nucleic acid sequences encoding FIX and modified FIX
that is codon optimized for expression in humans

| SEQ ID NO. | Portion of FIX | Description |
|---|---|---|
| 518 | encodes 47-461 | human WT-FIX mature codon |
| | | optimized for human 0.5 |
| | | optimization |
| 519 | encodes 47-461 | human WT-FIX-mature codon |
| | | optimized for human 0.8 |
| | | optimization |
| 520 | encodes 47-461 | human WT-FIX-mature codon |
| | | optimized for human 1.0 |
| | | optimization |
| 521 | encodes 47-461 | human FIX R318Y/R338E/T343R |
| | | mature codon optimized for |
| | | human 0.5 optimization |
| 522 | encodes 47-461 | human FIX R318Y/R338E/T343R |
| | | mature codon optimized for |
| | | human 0.8 optimization |
| 523 | encodes 47-461 | human FIX R318Y/R338E/T343R |
| | | mature codon optimized for |
| | | human 1.0 optimization |
| 524 | encodes 47-461 | human FIX R338L mature codon |
| | | optimized for human 0.5 |
| | | optimization |
| 525 | encodes 47-461 | human FIX R338L mature codon |
| | | optimized for human 0.8 |
| | | optimization |
| 526 | encodes 47-461 | human FIX R338L mature codon |
| | | optimized for human 1.0 |
| | | optimization |
| 527 | encodes 30-461 | hWT-FIX codon optimized for |
| | | human 0.5 optimization |

TABLE 43
Nucleic acid sequences encoding FIX and modified FIX
that is codon optimized for expression in humans

| SEQ ID | | |
|---|---|---|
| NO. | Portion of FIX | Description |
| 518 | encodes 47-461 | human WT-FIX mature codon optimized for |
| | | human 0.5 optimization |
| 519 | encodes 47-461 | human WT-FIX-mature codon optimized for |
| | | human 0.8 optimization |
| 520 | encodes 47-461 | human WT-FIX-mature codon optimized for |
| | | human 1.0 optimization |
| 521 | encodes 47-461 | human FIX R318Y/R338E/T343R mature codon |
| | | optimized for human 0.5 optimization |
| 522 | encodes 47-461 | human FIX R318Y/R338E/T343R mature codon |
| | | optimized for human 0.8 optimization |
| 523 | encodes 47-461 | human FIX R318Y/R338E/T343R mature codon |
| | | optimized for human 1.0 optimization |
| 524 | encodes 47-461 | human FIX R338L mature codon optimized for |
| | | human 0.5 optimization |
| 525 | encodes 47-461 | human FIX R338L mature codon optimized for |
| | | human 0.8 optimization |
| 526 | encodes 47-461 | human FIX R338L mature codon optimized for |
| | | human 1.0 optimization |
| 527 | encodes 30-461 | hWT-FIX codon optimized for human 0.5 |
| | | optimization |
| 528 | encodes 30-461 | hWT-FIX codon optimized for human 0.8 |
| | | optimization |
| 529 | encodes 30-461 | hWT-FIX codon optimized for human 1.0 |
| | | optimization |
| 530 | encodes 30-461 | human FIX R318Y/R338E/T343R codon |
| | | optimized for human 0.5 optimization |
| 531 | encodes 30-461 | human FIX R318Y/R338E/T343R codon |
| | | optimized for human 0.8 optimization |
| 532 | encodes 30-461 | human FIX R318Y/R338E/T343R codon |
| | | optimized for human 1.0 optimization |
| 533 | encodes 30-461 | human FIX R338L codon optimized for human |
| | | 0.5 optimization |
| 534 | encodes 30-461 | human FIX R338L codon optimized for human |
| | | 0.8 optimization |
| 535 | encodes 30-461 | human FIX R338L codon optimized for human |
| | | 1.0 optimization |
| 536 | precursor + intron | hFIXss-Pro-mini Intron-Pro-human wild type |
| | | FIX optimized 0.5 |
| 537 | precursor + intron | hFIXss-Pro-mini Intron-Pro-human wild type |
| | | FIX optimized 0.8 |
| 538 | precursor + intron | hFIXss-Pro-mini Intron-Pro-human wild type |
| | | FIX optimized 1.0 |
| 539 | precursor + intron | hFIXss-Pro-mini Intron-Pro-human FIX |
| | | R318Y/R338E/T343R optimized 0.5 |
| 540 | precursor + intron | hFIXss-Pro-mini Intron-Pro-human FIX |
| | | R318Y/R338E/T343R optimized 0.8 |
| 541 | precursor + intron | hFIXss-Pro-mini Intron-Pro-human FIX |
| | | R318Y/R338E/T343R optimized 1.0 |
| 542 | precursor + intron | hFIXss-Pro-mini Intron-Pro-human FIX |
| | | R338L optimized 0.5 |
| 543 | precursor + intron | hFIXss-Pro-mini Intron-Pro-human FIX |
| | | R338L optimized 0.8 |
| 544 | precursor + intron | hFIXss-Pro-mini Intron-Pro-human FIX |
| | | R338L optimized 1.0 |
| 545 | precursor + intron | mouse optimized hFIXss-Pro-mini Intron-Pro- |
| | | human wild type FIX optimized 0.5 |
| 546 | precursor + intron | mouse optimized hFIXss-Pro-mini Intron-Pro- |
| | | human wild type FIX optimized 0.8 |
| 547 | precursor + intron | mouse optimized hFIXss-Pro-mini Intron-Pro- |
| | | human wild type FIX optimized 1.0 |
| 548 | precursor + intron | mouse optimized hFIXss-Pro-mini Intron-Pro- |
| | | human FIX R318Y/R338E/T343R optimized 0.5 |
| 549 | precursor + intron | mouse optimized hFIXss-Pro-mini Intron-Pro- |
| | | human FIX R318Y/R338E/T343R optimized 0.8 |
| 550 | precursor + intron | mouse optimized hFIXss-Pro-mini Intron-Pro- |
| | | human FIX R318Y/R338E/T343R optimized 1.0 |
| 551 | precursor + intron | mouse optimized hFIXss-Pro-mini Intron-Pro- |
| | | human FIX R338L optimized 0.5 |
| 552 | precursor + intron | mouse optimized hFIXss-Pro-mini Intron-Pro- |
| | | human FIX R338L optimized 0.8 |
| 553 | precursor + intron | mouse optimized hFIXss-Pro-mini Intron-Pro- |
| | | human FIX R338L optimized 1.0 |

### Example 12

### FIX Production in Huh-7 Cells

[0660] rAAV modified FIX (CB2679), Padua FIX and wild-type FIX plasmids, described above in Example 10 and set forth in SEQ ID NOs:447-449 with the FIX codon optimized for expression in mouse (SEQ ID NOs:558-560), were transfected into the human hepatocellular carcinoma cell line Huh-7 and protein expression was assessed. Since the experiments are conducted in a mouse model, the codons were optimized for expression in mouse. The FIX sequences of the mouse optimized codons (SEQ ID NOs:558-560) share more than 90% sequence identity to the highest stringency human codon optimized sequences (SEQ ID NOs: 529, 532, 535). As a control a parental mini circle plasmid containing the same construct with the native, i.e. non-codon optimized, huFIX sequence was transfected in parallel.

[0661] 4.5×10⁵ cells were seeded in a volume of 3 mL per well of a 6-well plate. The next morning, the cells were transfected with 2.5 μg of each construct using Lipofectamine 3000 according to the manufacturer's instructions. 3 days post transfection, cell supernatants were collected. Next, cells were rinsed with DPBS, and lysed in 350 μL mammalian protein extraction reagent (M-PER®; Thermo Fisher Scientific) and cell lysates were harvested. Cell debris was removed by centrifugation and cell lysates and supernatants were analyzed for huFIX antigen expression by ELISA and Western Blot (WB). The results show that codon optimized huFIX, which share more than 90% sequence identity with the mouse optimized FIX, constructs expressed at higher levels than the non-codon optimized constructs. The results are set forth in Table C1, below.

[0662] Next, hFIX expression in Huh-7 cells transfected with the vectors was assessed. rAAV was prepared on a small scale using the AAVpro® purification kit (Takara, Cat No. 6666) rAAV vector containing wild-type hFIX packaged with a chimeric capsid (SEQ ID NO: 418) also was transduced, at a multiplicity of infection (MOI) of 20,000 vector genomes (vg) per cell. Cell lysates and supernatants were harvested 3 days post transduction and huFIX expression was assessed by ELISA and western blot.

[0663] The results are set forth in Table 44, below. The results show that the rAAV construct packaged with the capsid designated KP1 is capable of transducing Huh-7 cells with high efficiency. In cells transfected with the plasmids alone, codon optimized FIX expressed at higher levels than non-codon optimized FIX. Wild type FIX, Padua FIX and modified FIX all expressed at similar levels in Huh-7 cells.

TABLE 44
huFIX antigen levels after transfection of Huh-7 cells with
FIX constructs or transduction with rAAV expressing FIX.

| | | huFIX in | huFIX in Cell |
|---|---|---|---|
| | | Supernatants | Lysates |
| Delivery | Sample | (ng/mL) | (ng/mL) |
| Transfection | WT FIX | 106.3 | 93.4 |
| (plasmid) | | | |
| Transfection | Padua FIX | 94.7 | 70.7 |
| (plasmid) | | | |
| Transfection | Modified FIX | 83.6 | 59.5 |
| (plasmid) | (SEQ ID NO: 394) | | |
| Transfection | WT FIX, non-codon opt. | 27.0 | 20.1 |
| (plasmid) | | | |
| Transduction | WT FIX + Capsid | 219.3 | 166.1 |
| (rAAV) | set forth in | | |
| | SEQ ID NO: 418 (KP1) | | |

### Example 13

### FIX Expression in a Mouse Hemophilia Model Treated with the AAV Vector Designated DJ8

[0664] FIX protein expression and activity in mouse plasma after injection of a recombinant adeno-associated viral vector (rAAV) encoding and expressing modified FIX (mature form set forth in SEQ ID NO:394, except that residue 148 is A; SEQ ID NO:486) packaged in capsid designated DJ8 (SEQ ID NO:427) for comparison with the rAAV using the vectors and constructs provided herein (see, Example 14 below, in which constructs prepared as described herein are packaged in capsids provided herein.

[0665] In vivo transduction efficiency of rAAV packaged with the previously characterized AAV packaging construct encoding AAV/DJ8 (Bio-connect, The Netherlands; Grimm et al., J. Virol. 82:5887-5911 (2008); SEQ ID NO: 427) and encoding and expressing modified FIX (mature sequence set forth in SEQ ID NO:394, except for this example the residue at position 148 is A (alanine), sequence set forth in SEQ ID NO:486) was examined in mice. C57BL/6 FIX-deficient mice were injected with rAAV FIX vector packaged with the DJ8 capsid, and FIX expression and coagulation activity was monitored over several weeks.

### A. Cloning of the FIX Gene

[0666] Codon-optimized (co) human (h) FIX-R338L-Padua cDNA (Padua) or co-hFIX-CB 2679d-GT (modified FIX R318Y/R338E/T343R, mature sequence set forth in SEQ ID NO:394 where the amino acid at position 148 is A) cloned downstream of a liver-specific promoter (α1-anti-trypsin promoter, AAT) was cloned into a self-complementary (sc) AAV backbone (scAAV) (see e.g., McCarty et al., (2003) Gene Therapy 10:2112-2118) containing a mini-intron from minute virus of mice (MVM) upstream of the co-hFIX transgene and a bovine growth hormone polyadenylation signal (bGHpA). The Padua and modified FIX constructs contain the T148A residue; a known polymorphism in FIX. Both plasmids were verified by restriction digestion and Sanger sequencing using 13 different primers spanning the entire expression cassette and the scAAV backbone. The final AAV vector contains the AAT promoter-MVM-co-hFIX (Padua or CB2679, where the amino acid at position 148 is A)-bGHpA.

B. rAAV Vector Production

[0667] The unmodified FIX employed for these experiments was the allele that encodes T148A. rAAV vectors for producing the modified FIX (mature SEQ ID NO:486, which is SEQ ID NO:394 with the replacement T148A) or Padua FIX (SEQ ID NO:491) packaged with the DJ/8 capsid (SEQ ID NO:427) were generated using triple plasmid calcium phosphate transfection (Invitrogen Corp, Carlsbad, Calif., USA) of HEK-293T/17 cells with (1) the AAV plasmid of interest (pAAV-AAT-hFIX), (2) a chimeric AAV packaging construct encoding AAV/DJ8, and (3) an adenoviral helper plasmid. All plasmids required for AAV production were extracted using an endotoxin free maxiprep protocol (Thermo Fischer Scientific, Belgium). The AAV vectors were produced at high titer (5.2×10¹²-1.3×10¹³ vg/mL). rAAV was purified from the cell lysates by three rounds of cesium chloride (CsCl) gradient ultracentrifugation purification (see e.g., Grimm et al, J. of Virology 80(1):426-39 (2006)).

[0668] HEK-293T (ATCC #CRL-3216, Manassas, Va.) were seeded and expanded for 2 days prior to transfection in T225 flasks (Corning Inc., Corning, N.Y.). The cells were then transfected using a standard calcium phosphate-based protocol with a) hFIX-encoding rAAV vector plasmid (modified FIX or Padua), b) AAV serotype-specific packaging plasmid (AAV/DJ8), and c) adenoviral helper plasmid (adenovirus type 5 (pAd5); see e.g., Vandendriessche et al., J. Throm. Haem. (2007) 5:16-24; Chuah et al., J. Am. Soc. Gene Ther. (2014) 22:1605-1613). Two days post transfection, cells were harvested. Harvested cells were lysed by successive freeze/thaw cycles and sonication, digested for 1 hour at 37° C. with 200 U/mL Benzonase® digestion buffer (EMD Chemicals, Fisher #NC0544951, Waltham, Mass.) and deoxycholic acid (Sigma-Aldrich, St Louis, Mo., USA) to remove non-encapsidated single stranded (ss) and double stranded (ds) DNA and RNA and/or DNA and RNA leaking from broken virus particles.

[0669] All resulting rAAV preparations were processed identically using three rounds of ultrapure optical grade cesium chloride (CsCl, Invitrogen #15507-023, Waltham, Mass.) gradient centrifugation. Fractions containing the AAV vector were collected, concentrated and dialyzed into 1 mM MgCl₂ in Dulbecco's phosphate buffered saline (PBS; Gibco, BRL).

[0670] Vector titers (in viral genomes (vg) per mL) were determined by quantitative real-time polymerase chain reaction (qPCR) using vector-specific primer pairs. For all vectors, primers specific for the bGHpA sequence were used. The forward and reverse primers used were 5′-GCCTTCTAGTTGCCAGCCAT-3′ and 5′-GGCACCTTCCAGGGTCAAG-3′(SEQ ID NOs: 512 and 513, respectively). Reactions were performed with SYBR® Green PCR Master Mix, according to the manufacturer's instructions on an ABI 7500 Real-Time PCR System. Known copy numbers (102-108) of the respective vector plasmids were used to generate the standard curves. The AAV vectors were produced at high titer (5.2×10¹²-1.3×10¹³ vg/mL).

C. FIX Protein Expression in Plasma after Intravenous Injection of rAAV-Modified FIX and Padua FIX in a Mouse Model of Hemophilia B

[0671] C57BL/6 F9-deficient mice (3-5 mice/group) were injected via the tail vein with either 4 E+10, 2 E+11 or 4 E+11 vector genomes per kg (vg/kg) of rAAV FIX vector for expressing either modified FIX or Padua FIX assuming a mean animal weigh t of 25 grams. Whole blood was collected by phlebotomy of the retro orbital plexus at 1, 3, 5, 7, 8, 9, 12, 16 and 20 weeks post-intravenous dosing and plasma was prepared for bioanalytical assays.

[0672] Blood collected from the retro orbital plexus was diluted in 20% sodium citrate butter to a final amount of 0.4%. Plasma was prepared by centrifugation at 13,000 RPM at 4° C. for three minutes and treated blood samples were placed on dry ice and stored at −80° C. Blood and plasma samples were kept on ice throughout collection and processing. Plasma from non-injected or vehicle-injected mice were used as negative controls.

[0673] FIX concentrations in plasma were determined using a FIX enzyme-linked immunosorbent antigen assay (ELISA) specific for hFIX antigen (ASSERACHROM IX: Ag Enzyme Immunoassay for Factor FIX; Diagnostica Stago, France) according to the manufacturer's instructions using known concentrations of recombinantly expressed modified FIX or Padua FIX as controls.

[0674] The results show that modified FIX and Padua FIX expressed at similar levels; expression was maintained for at least 20 weeks post vector-injection in a dose-dependent manner.

D. FIX Activity in Plasma after Intravenous Injection of rAAV-Modified FIX and Padua FIX in a Mouse Model of Hemophilia B

[0675] rAAV FIX vectors expressing the modified FIX (CB2679) and Padua FIX (FIX R338L) were produced as detailed above in Sections A and B. C57BL/6 FIX-deficient mice (3-5 mice/group) were injected via the tail vein with either 4 E+10, 2 E+11 or 4 E+11 vector genomes per kg (vg/kg) of rAAV FIX vector expressing the modified FIX (or Padua FIX. Blood was collected retro-orbitally at weeks 1, 3, 5, 7, 8, 9, 12, 16 and 20 post-intravenous dosing, and plasma was prepared for examination of the functional coagulation activity of the modified FIX and Padua FIX. The results are set forth in Tables 45-47, below.

[0676] FIX activity levels were determined using an activated partial thromboplastin time (aPTT)-based Factor IX single-stage clotting assay. The aPTT-assay was performed on an ACL-TOP instrument (Instrumentation Laboratories (Bedford, Mass.)) using indicated reagents and protocols. Briefly, an aPTT reagent, sold as HemosIL® or SynthasIL was equilibrated at 37° C. and pre-incubated with dilutions of mouse plasma harvested at various time points from mice treated with the rAAV, according to the manufacturer's instructions. Clotting was induced through the automated addition of 20 mM calcium chloride, which triggers the coagulation process. For FIX clotting times, activity was also assessed using an aPTT-based Factor IX single-stage clotting assay, however, a different reagent set was employed as per the manufacturer's instructions (C.K. PREST kit and Start Max; Stago).

[0677] The results show that FIX activity, as determined by the aPTT-assay, was restored with modified FIX and Padua FIX expression. The modified FIX (SEQ ID NO:490) showed a significant increase in activity compared to vehicle control at all dose levels with the highest vector dose showing stable FIX activity level of 5-6 U/mL. Similarly, clotting times were reduced after administration of 4 E+10, 2 E+11 or 4 E+11 vg/kg of rAAV FIX vectors, compared to vehicle control (see Tables 45 and 46, below).

[0678] Phenotypic efficacy was assessed using a standard mouse tail-clip assay and following the blood loss and the bleeding time. Briefly, the mice were anesthetized, and the tails were placed in a pre-warmed saline solution for two minutes and subsequently cut at a 2.5 mm diameter. The tails were then immediately returned to the 37° C. saline solution and the bleeding time monitored until no further bleeding occurred or the end of study. Blood-containing saline was centrifuged at 520 g for 10 minutes at 4° C. to collect erythrocytes, which were then resuspended in 6 mL of lysis buffer (10 mM KHCO₃, 150 mM NH₄Cl, 0.1 mM EDTA). Lysis proceeded for 10 minutes at room temperature and samples were centrifuged again, at 520 g for 10 minutes at 4° C. The absorbance of the supernatants was measured at 570 nm spectroscopically to determine the amount of hemoglobin as an indication of blood loss. The bleeding time was significantly reduced (p<0.001) for all doses of modified FIX and Padua FIX compared to vehicle control. Blood loss volume also was reduced significantly in mice administered both rAAV FIX vectors (p<0.001), compared to vehicle control. Of note, the bleeding time was reduced 4-5-fold for mice receiving 2 E+11 and 4 E+11 vg/kg of modified FIX compared to Padua FIX (p<0.01) (see Table 47).

[0679] The increased FIX activity in the one-stage clotting assays and significantly reduced blood loss following gene therapy was similar in mice administered AAV-modified FIX and AAV-Padua (FIX R338L), and both FIX proteins showed significantly increased FIX expression and activity compared to vehicle alone. AAV-modified FIX (CB2679) demonstrated superior reduction in blood loss compared to AAV-FIX R338L.

TABLE 45
Modified FIX and Padua FIX activity in plasma after 4E+10, 2E+11 or 4E+11 vector genomes per
kg (vg/kg) administered intravenously via tail vein (values are ± standard deviation; nd = not determined).

| | | FIX activity in U/mL | | FIX activity in U/mL | | FIX activity in U/mL | |
|---|---|---|---|---|---|---|---|
| | | (4E+11 vg/kg) | | (2E+11 vg/kg) | | (4E+10 vg/kg) | |
| | Vehicle | modified | FIX- | Modified | FIX- | Modified | FIX- |
| week | PBS | FIX* | R338L | FIX | R338L | FIX | R338L |
| 1 | 0.11 ± 0.03 | 6.62 ± 1.92 | 4.48 ± 1.07 | 4.87 ± 1.40 | 2.39 ± 0.58 | nd | nd |
| 3 | nd | nd | nd | nd | nd | 0.92 ± 0.13 | 0.56 ± 0.16 |
| 5 | 0.12 | nd | nd | nd | nd | 0.90 ± 0.16 | 0.6 ± 0.17 |
| 7 | nd | 6.36 ± 0.97 | 5.68 ± 1.28 | 4.29 ± 0.60 | 2.79 ± 0.89 | nd | nd |
| 8 | nd | nd | nd | nd | nd | 0.79 ± 0.19 | 0.47 ± 0.147 |
| 9 | nd | 6.48 ± 1.20 | 5.54 ± 1.23 | 4.18 ± 1.35 | 2.81 ± 0.89 | nd | nd |
| 12 | 0.13 ± 0.04 | 5.32 ± 1.37 | 5.12 ± 1.49 | 4.02 ± 1.11 | 2.74 ± 0.93 | 0.97 ± 0.25 | 0.73 ± 0.16 |
| 16 | 0.20 ± 0.01 | 5.78 ± 1.61 | 4.96 ± 1.35 | 4.13 ± 0.89 | 2.63 ± 0.94 | 0.89 ± 0.29 | 0.70 ± 0.15 |
| 20 | 0.17 ± 0.04 | 5.66 ± 1.34 | 4.94 ± 1.00 | 4.38 ± 1.00 | 3.15 ± 0.98 | nd | nd |

*modified FIX is the FIX contain R318Y/R338E/T343R replacements (SEQ ID NO: 394 except with the T128A allele)

TABLE 46
Clotting time (in seconds) after 4E+10, 2E+11 or 4E+11 vector genomes per kg (vg/kg)
modified FIX (SEQ ID NO: 490) or Padua FIX (SEQ ID NO: 491) administered intravenously via tail vein.

| | Clotting time (seconds) | | | Clotting time (seconds) | | | Clotting time (seconds) | | |
|---|---|---|---|---|---|---|---|---|---|
| | (4E+11 vg/kg) | | | (2E+11 vg/kg) | | | (4E+10 vg/kg) | | |
| Week | FIX* | Padua | Vehicle | FIX* | Padua | Vehicle | FIX* | Padua | Vehicle |
| 1 | 16.1 ± 2.6 | 22.0 ± 1.5 | 49.7 ± 3.1 | 15.1 ± 2.5 | 21.4 ± 2.1 | 49.7 ± 3.1 | 23.0 ± 1.6 | 27.1 ± 3.3 | 50.0 ± 3.0 |
| 3 | 18.1 ± 1.7 | 18.5 ± 1.1 | 44.9 ± 6.8 | 17.4 ± 2.4 | 22.7 ± 3.5 | 44.9 ± 6.8 | 22.8 ± 1.6 | 25.7 ± 2.1 | 56.9 ± 4.1 |
| 5 | 15.5 ± 3.1 | 23.2 ± 1.2 | 50.8 ± 3.8 | 16.6 ± 2.4 | 25.1 ± 2.3 | 50.8 ± 3.8 | 25.7 ± 1.2 | 28.7 ± 0.5 | 53.4 ± 4.4 |
| 7 | 15.8V1.2 | 21.3 ± 1.7 | 56.9 ± 4.1 | 16.9 ± 1.7 | 24.5 ± 2.3 | 56.9 ± 4.1 | nd | nd | nd |
| 8 | nd | nd | nd | nd | nd | nd | 27.7 ± 0.5 | 30.3 ± 0.8 | 57.1 ± 5.9 |
| 9 | 15.9 ± 0.6 | 23.0 ± 2.6 | 53.4 ± 4.4 | 16.5 ± 1.6 | 26.3 ± 2.4 | 53.4 ± 4.4 | nd | nd | nd |
| 12 | 17.7 ± 3.1 | 21.5 ± 2.7 | 57.1 ± 5.9 | 17.1 ± 1.8 | 26.0 ± 2.1 | 57.1 ± 5.9 | 30.6 ± 3.1 | 38.4 ± 3.0 | 62.3 ± 5.1 |
| 16 | 22.8 ± 2.8 | 27.1 ± 2.8 | 62.3 ± 5.1 | 23.0 ± 3.2 | 29.5 ± 1.2 | 62.3 ± 5.1 | 31.9 ± 1.7 | 35.4 ± 2.7 | 60.1 ± 5.0 |
| 20 | 21.9 ± 2.1 | 28.7 ± 2.8 | 60.1 ± 5.0 | 22.5 ± 3.4 | 29.9 ± 2.2 | 60.1 ± 5.0 | nd | nd | nd |

FIX* is the modified FIX whose mature sequence is set forth in SEQ ID NO: 394, except with the T148A allele (see SEQ ID NO: 490)

TABLE 47
Blood loss (Hb at 570 nm) and bleeding time (in minutes) after 4E+10
or 2E+11 vector genomes per kg modified FIX (SEQ ID NO: 490)
or Padua FIX (SEQ ID NO: 491) administered intravenously via tail
vein (values are ± standard deviation; nd = not determined).

| | Blood Loss (Hb) | | | Blood Loss (Hb) | | |
|---|---|---|---|---|---|---|
| | (4E+10 vg/kg) | | | (2E+11 vg/kg) | | |
| Week | FIX* | Padua | Vehicle | FIX* | Padua | Vehicle |
| 20 | 0.26 ± 0.10 | 0.13 ± 0.07 | 1.18 ± 0.33 | 0.15 ± 0.03 | 0.19 ± 0.04 | 1.33 ± 0.32 |
| | Bleeding time (minutes) | | | Bleeding time (minutes) | | |
| | (4E+10 vg/kg) | | | (2E+11 vg/kg) | | |
| Week | FIX* | Padua | Vehicle | FIX* | Padua | Vehicle |
| 20 | 7.4 ± 4.6 | 29.4 ± 12.1 | 63.3 ± 4.8 | 5.2 ± 2.4 | 24.6 ± 9.2 | 63.3 ± 4.8 |

FIX* is the modified FIX whose mature sequence is set forth in SEQ ID NO: 394

E. FIX Transduction Efficiency and Biodistribution after Intravenous Injection of rAAV-Modified FIX and rAAV-Padua FIX in a Mouse Model of Hemophilia B

[0680] Quantitative PCR assessments were performed to determine vector copy number per cell and RNA expression in a panel of 8 organs from mice injected with 2 E+11 or 4 E+11 vg/kg of AAV-modified FIX (SEQ ID NO:486 or 394 with the replacement T148A) or AAV-Padua FIX. RNA expression of the transgene was normalized to mouse GAPDH expression.

[0681] Mice were euthanized and a panel of organs was collected for further DNA and RNA analyses. Genomic DNA and RNA was extracted from different tissues using the AllPrep DNA/RNA Mini Kit (Qiagen, Chatsworth, Calif., USA) according to the manufacturer's instructions. 100-150 ng of genomic DNA was analyzed using qPCR on an ABI Prism 7900HT (Applied Biosystems, Foster City/CA, USA) and GoTaq® qPCR Master Mix (Promega, Madison, Wis., USA) with bghpA specific forward (5′-GCCTTCTAGTTGCCAGCCAT-3′) and reverse (5′-GGCACCTTCCAGGGTCAAG-3′) primers, according to the manufacturer's instructions.

[0682] To generate standard curves, known copy numbers of the corresponding vector plasmid were used. The isolated RNA was used for cDNA synthesis. 100 ng of RNA was reverse transcribed into cDNA by the GoScript™ Reverse Transcription system (Promega, Madison, Wis., USA) and analyzed by qPCR (ABI Prism 7900HT, Applied Biosystems, Foster City/CA, USA) and GoTaq® qPCR Master Mix (Promega, Madison, Wis., USA) with bghpA specific forward (5′-GCCTTCTAGTTGCCAGCCAT-3′) and reverse (5′-GGCACCTTCCAGGGTCAAG-3′) primers (SEQ ID NOs: 512 and 513 respectively). Expression levels were normalized to murine glyceraldehyde-3-phosphate dehydrogenase (GAPDH) mRNA expression, obtained by using the forward primer 5′-TGTGTCCGTCGTGGATCTGA-3′ and reverse primer 5′-GCCTGCTTCACCACCTTCTTGA-3′ (SEQ ID NOs: 516 and 517 respectively). Expression levels were determined based on the 2-ΔcT method.

[0683] The results show that the liver was predominately transduced with both vectors and to a lesser extent other organs were transduced, consistent with the known biodistribution of the AAV/DJ-8 serotype (see e.g., Grimm et al., J. Virol. 82:5887-9141 (2008)). Similarly, mRNA expression analysis by quantitative real-time PCR showed that modified FIX (SEQ ID NO: 394) and Padua FIX (SEQ ID NO: 488) were exclusively restricted to the liver by virtue of the liver-specific AAT promoter (see, e.g., Grimm et al., J. Virol. 82:5887-9141 (2008)).

F. Immune Response and Toxicity after Intravenous Injection of Modified FIX and Padua FIX in a Mouse Model of Hemophilia B

[0684] To assess the immune consequences of expressing modified FIX and Padua FIX protein at high levels following AAV-based gene therapy, the anti-FIX antibody response was examined.

[0685] Anti-FIX antibody titers were analyzed using a modified ELISA protocol. Briefly, 96-well microtiter plates were coated with purified recombinant FIX (SEQ ID NO: 394) or Padua FIX (SEQ ID NO:488) at 1 μg/mL. Serially diluted reference standards were prepared with purified mouse IgG (Invitrogen, Europe). As a positive control, mice were injected with a FIX vector expressing wild-type FIX from the ubiquitously expressed cytomegalovirus (CMV) promoter which invariably results in high-titer anti-FIX antibodies.

[0686] The plates were incubated overnight at 4° C. On day two, the samples of mouse plasma taken at various time points during the study were diluted in dilution buffer, loaded on the pre-coated plates and incubated for two hours at room temperature. Experimental plasma samples were obtained from mice injected with different doses of the AAV vector. The plates were then incubated with horseradish peroxidase (HRP) conjugated goat anti-mouse IgG (Invitrogen, Europe) as a secondary antibody. Anti-hFIX antibody levels were measured following incubation with a detection buffer constituting 12 mL 0.01M sodium citrate, 12 mg o-phenylenediamine and 2.5 μL hydrogen peroxide (Invitrogen, Europe). The colorimetric reaction was monitored by determining the absorbance at 450 nm.

[0687] The results show that the majority of FIX-deficient hemophilia B mice treated with the AAV-AAT-modified FIX (SEQ ID NO: 394) did not develop any anti-FIX antibody response. At weeks 9 and 20, anti-FIX titer was low or comparable to vehicle-injected controls and substantially lower than the positive control for both FIX variants, indicating low immunogenicity of modified FIX (SEQ ID NO: 394) and Padua-FIX (SEQ ID NO: 488) after AAV-based gene therapy.

[0688] To assess for liver toxicity, aspartate aminotransferase (AST) and alanine transaminase (ALT) activity were determined in plasma using AST (MAK055-1KT, Sigma Aldrich, MO, USA) and ALT activity assay kits (MAK052-1KT, Sigma Aldrich, MO, USA), according to the manufacturer's instructions. At weeks one and three post vector administration, AST and ALT levels in plasma were determined for AAV-modified FIX (SEQ ID NO: 394) vector at the 4 E+10, 2 E+11 or 4 E+11 vg/kg dose levels. In normal healthy mice, the expected levels of ALT are up to 60 mU/mL and AST falls in the range of 50-100 mU/mL.

[0689] The liver toxicity results show that AST and ALT levels were within normal parameters (defined above) after injecting the FIX-deficient mice with AAV-modified FIX (SEQ ID NO: 394) vector. While still within the normal range, a slight and transient increase in AST and ALT levels was observed at one week post vector administration in those cohorts receiving the mid-dose (2 E+11 vg/kg) and high dose (4 E+11 vg/kg) of AAV-modified FIX (SEQ ID NO:394) and AAV-Padua (SEQ ID NO:488). The effect was transient, as by week three AST and ALT levels were comparable to vehicle-injected control mice. In the low dose cohorts, no increase in AST or ALT levels was observed.

### Example 14

### FIX Protein Expression and Activity in Mouse Plasma after Injection of a Recombinant Adeno-Associated Viral Vector (rAAV), Provided Herein, Encoding Modified FIX, Padua FIX, and WT-FIX

[0690] For this example, the modified FIX, Padua FIX, and WT-FIX, contain the residue T at position 148. As above, modified FIX, Padua FIX, and WT-FIX refer to the FIX whose mature forms are set forth in SEQ ID NOs:394, 488, and 3, with a modification of T at residue 148 (SEQ ID NOs: 489, 491, 490), respectively.

[0691] In vivo transduction efficiency of each rAAV packaged with the capsid designated KP1 (SEQ ID NO:418), and expressing modified FIX, Padua FIX, or wild-type FIX, was examined in mice. C57BL/6 FIX-deficient mice were injected with rAAV FIX vector packaged with the capsid KP1; FIX expression and coagulation activity were monitored over several weeks.

A. FIX Protein Expression in Plasma after Intravenous Injection of Modified FIX, Padua FIX and WT-FIX-rAAV in a Mouse Model of Hemophilia B

[0692] rAAV FIX vector expressing either modified FIX, Padua FIX, or wild-type FIX was produced as detailed above in Example 10. C57BL/6 F9-deficient mice (3-5 mice/group) were injected via the tail vein with either 8 E+11, 8 E+10 or 8 E+9 vector genomes per kg (vg/kg) assuming a nominal mouse weight of 25 grams of rAAV FIX vector expressing either modified, Padua FIX or wild-type FIX packaged in the capsid designated KP1 (SEQ ID NO:418). Blood was collected from the retro orbital plexus at weeks 1, 2, 3, 4, 5, 7, 9, 12, 14 and 17 post-intravenous dosing and plasma was prepared for bioanalytical assays.

[0693] For blood collection from the retro orbital plexus, non-heparinized capillaries were rinsed with 3.8% sodium citrate and used for blood collection. Sodium citrate was added to blood collected to 0.4% of final. Plasma was prepared by centrifugation at 10,000 RPM at 4° C. for ten minutes and treated blood samples were stored at −80° C. Blood and plasma samples were kept on ice throughout collection and processing.

[0694] The FIX concentration in plasma was determined using a FIX enzyme-linked immunosorbent antigen assay (ELISA). Briefly, wells of a 96-well plate were coated with 2 μg/mL of anti-human Factor IX antibody (AHIX-5041, Heamatologic Technologies, Essex VT) to capture the FIX. Detection of the captured FIX was performed with a goat anti-human FIX polyclonal antibody conjugated with HRP (GAFIX-HRP, Affinity Biologicals, Ontario Canada), at 2 μg/mL. Upon binding of FIX to the FIX antibody, a colorimetric signal was emitted, wherein signal strength is directly proportional to the quantity of FIX. The colorimetric reaction was measured on a Spectra MAX UV/VIS with SOFTmax PRO (Molecular Devices, San Jose, Calif.) and the unknown FIX concentrations in plasma were interpolated from a standard curve ranging from 0.4 ng/mL to 800 ng/mL of recombinantly expressed variant, Padua or wild-type FIX.

[0695] Data are provided in Table 48, below. The results show that no significant differences in plasma FIX levels were observed among modified FIX, Padua FIX and wild-type FIX. The levels observed are stable for up to 17 weeks and equivalent to approximately 5-10% of normal mice when using 8 E+11 vg/kg vector injection of AAV-FIX. Vector injections at lower doses (8 E+10 and 8 E+9 vg/kg) led to lower plasma FIX levels reaching a plateau within two weeks and remained stable through week 7.

TABLE 48
modified FIX, Padua FIX and wild-type FIX levels in plasma after 8E+11, 8E+10
and 8E+9 vector genomes per kg administered intravenously via the tail vein
(values are ± standard deviation; nd = not determined; FIX* is the
modified FIX whose mature sequence is set forth in SEQ ID NO: 394).

| | Average levels of FIX (μg/mL) | | | Average levels of FIX (μg/mL) | | | Average levels of FIX (μg/mL) | | |
|---|---|---|---|---|---|---|---|---|---|
| | (8E+11 vg/kg) | | | (8E+10 vg/kg) | | | (8E+9 vg/kg) | | |
| | | FIX- | FIX- | | FIX- | FIX- | | FIX- | FIX- |
| Week | FIX* | Padua | WT | FIX* | Padua | WT | FIX* | Padua | WT |
| 1 | 26.53 ± | 26.87 ± | 20.66 ± | 3.66 ± | 2.96 ± | 1.97 ± | 0.16 ± | 0.19 ± | 0.11 ± |
| | 3.67 | 4.16 | 1.03 | 0.76 | 0.49 | 0.75 | 0.01 | 0.11 | 0.03 |
| 2 | 26.91 ± | 23.52 ± | 16.98 ± | 4.28 ± | 3.94 ± | 2.60 ± | 0.19 ± | 0.22 ± | 0.13 ± |
| | 3.36 | 3.49 | 2.82 | 0.52 | 1.96 | 0.03 | 0.02 | 0.10 | 0.02 |
| 3 | 20.54 ± | 19.66 ± | 15.13 ± | nd | nd | nd | nd | nd | nd |
| | 2.94 | 4.74 | 1.69 | | | | | | |
| 4 | 17.91 ± | 19.70 ± | 15.17 ± | 4.98 ± | 4.38 ± | 2.95 ± | 0.23 ± | 0.25 ± | 0.15 ± |
| | 3.89 | 3.13 | 2.53 | 0.50 | 1.63 | 0.45 | 0.02 | 0.14 | 0.04 |
| 5 | 17.04 ± | 18.39 ± | 13.10 ± | nd | nd | nd | nd | nd | nd |
| | 2.30 | 3.30 | 2.70 | | | | | | |
| 7 | 14.33 ± | 16.23 ± | 11.47 ± | 4.46 ± | 3.21 ± | 2.18 ± | 0.25 ± | 0.25 ± | 0.13 ± |
| | 2.73 | 1.01 | 1.25 | 0.70 | 0.57 | 0.45 | 0.05 | 0.14 | 0.03 |
| 9 | 15.06 ± | 15.17 ± | 12.85 ± | nd | nd | nd | nd | nd | nd |
| | 3.79 | 2.47 | 1.77 | | | | | | |
| 12 | 12.14 ± | 14.77 ± | 11.13 ± | nd | nd | nd | nd | nd | nd |
| | 0.71 | 2.50 | 1.33 | | | | | | |
| 14 | 13.16 ± | 13.23 ± | 10.65 ± | nd | nd | nd | nd | nd | nd |
| | 2.10 | 3.12 | 1.06 | | | | | | |
| 17 | 13.07 ± | 14.12 ± | 10.67 ± | nd | nd | nd | nd | nd | nd |
| | 3.05 | 2.38 | 2.22 | | | | | | |

B. FIX Activity in Plasma after Intravenous Injection of Modified FIX, Padua FIX and WT-FIX-rAAV in a Mouse Model of Hemophilia B

[0696] rAAV FIX vectors expressing either modified FIX, Padua FIX, or wild-type FIX were produced as detailed above in Example 10. C57BL/6 FIX-deficient mice (3-5 mice/group) were injected via the tail vein with either 8 E+11, 8 E+10 or 8 E+9 vector genomes per kg (vg/kg) assuming a nominal mouse weight of 25 grams of rAAV FIX vector expressing either modified FIX, Padua FIX, or wild-type FIX. Blood was collected retro-orbitally at weeks 1, 2, 3, 4, 5, 7, 9, 12, 14 and 17 post-intravenous dosing and plasma was prepared for examination of the functional coagulation activity for each of the modified FIX, Padua FIX, and wild-type FIX cohorts.

[0697] FIX activity was assessed using an activated partial thromboplastin time (aPTT)-based factor IX single-stage clotting assay. The aPTT-assay was performed on an ACL-TOP instrument (Instrumentation Laboratories (Bedford, Mass.)) using indicated reagents and protocols. Briefly, an aPTT reagent, sold as HemosIL® or SynthasIL was equilibrated at 37° C. and pre-incubated with dilutions of mouse plasma harvested at various time points from mice treated with the rAAV, according to the manufacturer's instructions. Clotting was induced through the automated addition of 20 mM calcium chloride, which triggers the coagulation process. The resultant clot was detected by measuring the change in optical density. The amount of time required for the plasma specimen to clot also was recorded. Calibration was performed with the HemosIL Calibration Plasma (Instrumentation Laboratories, Bedford, Mass.) as a reference traceable to the WHO standard (09/172). Each sample was run in duplicate and using the required number of dilutions to obtain valid and reportable results. Sample dilutions ranged from 1:10 to 1:300, depending on anticipated FIX expression levels.

[0698] Data are provided in Table 49, below. The results show that FIX activity, as determined by the activated partial thromboplastin time (aPTT)-assay, was restored with wild-type FIX. Modified FIX and Padua FIX show approximately 15- and 8-fold increases in activity, respectively, compared to wild-type FIX. Thus, modified FIX and Padua FIX showed dramatically increased activity compared to this baseline level of wild-type FIX when the AAV is packaged with the capsid of SEQ ID NO: 418, and at levels approximately 10-fold higher than FIX packaged with the previously characterized DJ8 capsid (see, Example 12 and Table 45, above).

TABLE 49
Modified FIX, Padua FIX, and wild-type FIX activity in plasma after 8E+11,
8E+10 and 8E+9 vector genomes per kg administered intravenously
via tail vein (values are ± standard deviation; nd = not determined).

| | FIX activity in U/mL | | | FIX activity in U/mL | | | FIX activity in U/mL | | |
|---|---|---|---|---|---|---|---|---|---|
| | (8E+11 vg/kg) | | | (8E+10 vg/kg) | | | (8E+9 vg/kg) | | |
| | | FIX- | FIX- | | FIX- | FIX- | | FIX- | FIX- |
| Week | FIX* | Padua | WT | FIX* | Padua | WT | FIX* | Padua | WT |
| 1 | 129.73 ± | 63.47 ± | 7.74 ± | 16.36 ± | 7.81 ± | 1.03 ± | 0.71 ± | 0.53 ± | 0.13 ± |
| | 21.58 | 12.52 | 0.86 | 3.12 | 1.89 | 0.27 | 0.04 | 0.22 | 0.01 |
| 2 | 131.14 ±± | 61.09 ± | 6.82 ± | 19.21 ± | 9.59 ± | 1.19 ± | 0.85 ± | 0.60 ± | 0.16 ± |
| | 19.94 | 11.34 | 1.52 | 2.13 | 4.24 | 0.05 | 0.11 | 0.25 | 0.02 |
| 3 | 109.24 ± | 45.36 ± | 6.02 ± | nd | nd | nd | nd | nd | nd |
| | 15.09 | 9.56 | 0.6 | | | | | | |
| 4 | 81.02 ± | 44.22 ± | 5.95 ± | 22.99 ± | 10.26 ± | 1.40 ± | 0.84 ± | 0.67 ± | 0.17 ± |
| | 11.71 | 6.09 | 1.08 | 3.04 | 2.68 | 0.25 | 0.07 | 0.31 | 0.02 |
| 5 | 88.71 ± | 48.35 ± | 5.26 ± | nd | nd | nd | nd | nd | nd |
| | 8.03 | 9.47 | 0.65 | | | | | | |
| 6.5 | nd | nd | nd | 22.29 ± | 9.28 ± | 1.17 ± | 0.76 ± | 0.44 ± | 0.10 ± |
| | | | | 3.28 | 1.55 | 0.32 | 0.10 | 0.25 | 0.01 |
| 7 | 66.50 ± | 39.84 ± | 5.09 ± | nd | nd | nd | nd | nd | nd |
| | 10.56 | 1.79 | 0.63 | | | | | | |
| 9 | 57.18 ± | 30.25 ± | 4.57 ± | nd | nd | nd | nd | nd | nd |
| | 8.38 | 4.32 | 0.65 | | | | | | |
| 11.5 | 55.78 ± | 33.64 ± | 4.07 ± | nd | nd | nd | nd | nd | nd |
| | 3.93 | 6.63 | 0.27 | | | | | | |
| 13.5 | 71.59± | 36.38 ± | 3.37 ± | nd | nd | nd | nd | nd | nd |
| | 10.43 | 9.80 | 0.76 | | | | | | |
| 16.5 | 66.79 ± | 43.49 ± | 5.48 ± | nd | nd | nd | nd | nd | nd |
| | 12.68 | 9.60 | 1.05 | | | | | | |

FIX* is the modified FIX whose mature sequence is set forth in SEQ ID NO: 394, with the 148A allele

C. FIX Specific Activity in Plasma after Intravenous Injection of Modified FIX, Padua FIX and WT-FIX-rAAV in a Mouse Model of Hemophilia B

[0699] The specific activity of FIX, modified FIX and Padua FIX was determined by the assessment of antigen levels and protein coagulation activity. The FIX-specific activity was calculated by dividing the clotting activity by the antigen levels and expressing the results in units per milligram.

[0700] Data are set forth in Table 50, below. The results show that the specific activity of modified FIX was consistently highest for modified FIX for all levels of vg administered. For example, modified FIX showed 12-14 times the specific activity of wild-type FIX after administration of 8 E+10 and 8 E+9 vg per animal of the AAV vector. This was greater than the specific activity of Padua FIX, which showed approximately 6 times the specific activity of wild-type FIX. Thus, modified FIX has dramatically improved FIX specific activity with the modified FIX set forth in SEQ ID NO: 394, and exceeds the previously characterized high activity Padua FIX (SEQ ID NO: 488).

TABLE 50
Modified FIX, Padua FIX and wild-type FIX activity in plasma after 8E+11, 8E+10
and 8E+9 vector genomes per kg administered intravenously via tail vein (values
are ± standard deviation; nd = not determined; FIX* is the modified
FIX whose mature sequence is set forth in SEQ ID NO: 394, except with the T148A allele).

| | FIX Specific Activity (U/μg) | | | FIX Specific Activity (U/μg) | | | FIX Specific Activity (U/μg) | | |
|---|---|---|---|---|---|---|---|---|---|
| | (8E+11 vg/kg) | | | (8E+10 vg/kg) | | | (8E+9 vg/kg) | | |
| | | FIX- | FIX- | | FIX- | FIX- | | FIX- | FIX- |
| Week | FIX* | Padua | WT | FIX* | Padua | WT | FIX* | Padua | WT |
| 1 | 5.20 ± | 2.36 ± | 0.37 ± | 4.48 ± | 2.62 ± | 0.55 ± | 4.56 ± | 2.88 ± | 1.27 ± |
| | 0.37 | 0.29 | 0.03 | 0.17 | 0.19 | 0.09 | 0.15 | 0.47 | 0.24 |
| 2 | 5.20 ± | 2.45 ± | 0.37 ± | 4.49 ± | 2.48 ± | 0.46 ± | 4.57 ± | 2.67 ± | 1.24 ± |
| | 0.47 | 0.29 | 0.02 | 0.18 | 0.17 | 0.02 | 0.26 | 0.06 | 0.16 |
| 3 | 5.41 ± | 2.33 ± | 0.40 ± | nd | nd | nd | nd | nd | nd |
| | 0.59 | 0.20 | 0.03 | | | | | | |
| 4 | 4.58 ± | 2.26 ± | 0.39 ± | 4.69 ± | 2.40 ± | 0.48 ± | 3.71 ± | 2.80 ± | 1.28 ± |
| | 0.47 | 0.26 | 0.03 | 1.09 | 0.26 | 0.04 | 0.11 | 0.35 | 0.53 |
| 5 | 5.25 ± | 2.63 ± | 0.41 ± | nd | nd | nd | nd | nd | nd |
| | 0.56 | 0.20 | 0.04 | | | | | | |
| 6.5 | nd | nd | nd | 5.01 ± | 2.90 ± | 0.53 ± | 3.02 ± | 1.70 ± | 0.72 ± |
| | | | | 0.11 | 0.06 | 0.05 | 0.15 | 0.01 | 0.08 |
| 7 | 4.66 ± | 2.46 ± | 0.44 ± | nd | nd | nd | nd | nd | nd |
| | 0.30 | 0.12 | 0.03 | | | | | | |
| 9 | 3.91 ± | 2.00 ± | 0.36 ± | nd | nd | nd | nd | nd | nd |
| | 0.67 | 0.06 | 0.04 | | | | | | |
| 11.5 | 4.60 ±± | 2.28 ± | 0.37 ± | nd | nd | nd | nd | nd | nd |
| | 0.38 | 0.28 | 0.03 | | | | | | |
| 13.5 | 5.47 ± | 2.75 ± | 0.31 ± | nd | nd | nd | nd | nd | nd |
| | 0.44 | 0.29 | 0.05 | | | | | | |
| 16.5 | 5.15 ± | 3.07 ± | 0.52 ± | nd | nd | nd | nd | nd | nd |
| | 0.27 | 0 32 | 0 06 | | | | | | |

[0701] The experiments detailed above, with results set forth in Tables 48, 49 and 50, were continued for additional time, and FIX expression, activity and specific activity, were measured. The results show that FIX expression and activity at the later time point follow the trends of the earlier time points. For example, mice administered 8 E+11 vg/kg of modified FIX, Padua FIX, or wild-type FIX, showed stable FIX levels at 18 weeks post injection. Mice administered 8 E+10 vg/kg and 8 E+9 vg/kg FIX showed stable FIX levels for up to 12 weeks, with higher expression of modified FIX, and Padua FIX, compared to wild-type FIX. FIX activity and specific activity also were tracked for 18 weeks in mice administered 8 E+11 vg/kg FIX, and for 12 weeks in mice administered 8 E+10 vg/kg and 8 E+9 vg/kg FIX. The results show that FIX activity and specific activity, in all groups, was maintained at the 18 week and 10 week time points, with modified FIX showing the highest activity at all of 8 E+11, 8 E+10 and 8 E+9 vg/kg, followed by Padua FIX. Modified FIX and Padua FIX showed significantly higher activity than wild-type FIX at all time points, through 12 weeks for mice administered 8 E+10 and 8 E+9 vg/kg, and through 18 weeks in mice administered 8 E+11 vg/kg. Specific huFIX activity in animals injected with modified FIX expressing rAAV was around 10-fold or 2-fold enhanced as compared to those injected with wild type or Padua respectively (8×10″ and 8×10⁹ groups).

### D. Conclusions

[0702] The in vivo performances of the three FIX constructs: the modified FIX (mature sequence designated CB2769 and set forth in SEQ ID NO:394, except that residue 148 is the A allele), Padua FIX, and wild-type FIX demonstrate stabilizing antigen levels by week three that were ˜10-fold higher than observed using the DJ/8 capsid (Example above). The new rAAV expression cassette in conjunction with the KP1 capsid was shown to exhibit robust and very strong huFIX expression after injection into hemophilic mice. FIX activity levels were significantly increased for the modified variants, modified FIX and Padua, compared to the wild-type transgene at week three (109 IU/mL and 45 IU/mL versus 6 IU/mL for modified FIX, Padua, and wild-type respectively at the 8 E+11 vg/kg dose). In accord with the antigen data, the observed FIX activity levels for modified FIX were more than 10-fold higher than the activity levels using the DJ/8 (Example 13, above, and Example 16, below) vector at comparable doses. Comparative data are as follows:

| | | | FIX Activity |
|---|---|---|---|
| FIX | Capsid | Dose | (U/mL) |
| Modified FIX | KP1 | 8.0E+10 | 20 |
| R338L | TAK-748* | 7.4E+11 | 20 |
| R338L | TAK-748* | 7.4E+11 | 1 |
| Modified FIX | DJ8 | 2.0E+11 | 4 |
| Modified FIX | DJ8 | 2.0E10 | 1 |

*Weller et al.(2019) Blood 134: S1 P4633; see, also Example 15

These results demonstrate that the combination of the chimeric capsid and modified FIX that combines increased coagulation activity, resistance to endogenous inhibitor, and increased FVIII binding provides a striking increase in FIX activity levels.

[0703] Therefore, the combination of the AAV-vectors described herein for encoding and delivering modified FIX that have enhanced potency, such at least about 7, 10, or 20-fold higher than wild-type exhibits, and as constructed with an intron, provide improved transgene expression in vivo. The vectors and constructs provided herein, can be administered with lower the viral doses than other current rAVV-FIX gene therapy vectors, to achieve FIX activity levels for treating or essentially curing hemophilia in treated individuals.

### Example 15

### Evaluation of the Human Factor IX Gene Therapy Vector TAK-748 (SHP648)

### COMPARATIVE EXAMPLE

[0704] FIX protein expression and activity in mouse plasma after intravenous injection of a recombinant adeno-associated viral vector (rAAV) TAK-748 encoding and expressing Padua FIX (with the single replacement R338L) is described, for comparison with Example 14. For comparison with the rAAV vectors and constructs provided herein, in vivo transduction efficiency of rAAV TAK-748 (Baxalta US Inc., a Takeda company, Lexington, Mass., USA) and expression of the modified FIX with the replacement R338L (SEQ ID NO: 488) was examined in mice.

### A. TAK-748 Vector (Previously Designated SHP-648)

[0705] TAK-748 is a single stranded AAV vector, based on AAV8, that includes the insertion of 3 hepatocyte-specific cis-regulatory elements (CRM8) to increase the strength of the liver-specific transthyretin (TTR) promoter driving expression of the Padua variant human FIX transgene. The TTR enhancer promoter delivers liver-restricted expression of the transgene. The FIX transgene (encoding the modified FIX set forth in SEQ ID NO: 488) is a cytosine-phosphate-guanosine (CpG)-depleted FIX variant. This codon optimized CpG-depleted nucleotide sequence was designed to increase FIX expression and decrease potential immunogenicity.

B. FIX R338L Activity after Intravenous Injection of FIX Gene Therapy Vector TAK748 in a Mouse Model of Hemophilia B

[0706] Male FIX KO mice (N=12/group) received a single intravenous dose of TAK-748 7.4 E+10, 1.5 E+11, 7.4 E+11, or 1.5 E+12 vector genomes [vg]/kg, or buffer as a negative control. FIX expression, blood clotting activity, transduction efficiency and safety were monitored over several weeks.

[0707] FIX R338 L Activity

[0708] Blood was collected on days 3, 7, 14, 28, 42, 56 and 84 and FIX activity in plasma was analyzed using a one-stage clotting assay. The results show that TAK-748 administration increased the mean FIX activity in FIX knock-out mice plasma in a dose-dependent manner. Administration of 1.5 E+12 vg/kg increased mean FIX activity to supraphysiologic levels of up to 41.0 IU/mL. FIX activity levels in plasma from control FIX knockout (KO) mice treated with buffer were below the lower limit of quantification.

[0709] Blood loss also was assessed using a tail-tip bleeding assay. The results show that mean blood loss in buffer control was approximately 30 mg/g. In the animals administered the TAK-748 FIX vector, blood loss was reduced in a dose dependent manner. Blood loss was significantly reduced in groups administered 1.5 E+11, 7.4 E+11, or 1.5 E+12 vector genomes (vg/kg) compared to the buffer control (P<0.05).

[0710] Transduction Efficiency

[0711] The viral transduction efficiency of TAK-748 in liver tissue was analyzed by quantitative real-time polymerase chain reaction (qPCR) and histological analysis. The results show a dose dependent increase in FIX copies per cell. For example, there was approximately 2-fold more copies of FIX per cell after administration of 7.4 E+11 compared to 1.5 E+12. Similar results were demonstrated after immunohistochemical analysis, which showed a dose-dependent increase in FIX expression in liver after TAK-748 administration.

[0712] Safety Assessments

[0713] Animals were monitored for clinical and histopathological adverse effects. Selected organs (liver, spleen, kidney, and heart) were analyzed. The results show that no clinical histopathological or signs, or premature deaths were recorded in animals treated with TAK-748.

C. FIX R338L Activity after Intravenous Injection of FIX Gene Therapy Vector TAK748 in Rhesus Monkeys

[0714] Male rhesus monkeys (N=3/group) were administered a single intravenous bolus injection of TAK-748-FIX at 3.8 E+11, 9.5 E+11, or 1.9 E+12 vg/kg. Blood samples were collected prior to dosing and weekly thereafter, until week 18. Plasma FIX activity, human (hu)FIX antigen, and anti-hu-v FIX neutralizing antibodies were analyzed.

[0715] FIX R338L Activity

[0716] Blood was collected weekly for 12 weeks and FIX activity in plasma was analyzed using a one-stage clotting assay. The results show that TAK-748 administration to rhesus monkeys resulted in a dose-dependent increase in mean plasma FIX activity and antigen. Peak levels of hu-FIX R338L (SEQ ID NO: 488) expression were detected 2-4 weeks after treatment. Mean hu-FIX activity was 0.3, 0.6, and 1.9 IU/mL after treatment with 3.8 E+11 vg/kg, 9.5 E+11 vg/kg, and 1.9 E+12 vg/kg TAK-748, respectively. A significant reduction in FIX activity and huFIX protein was observed in most animals beginning approximately 4 weeks after dosing. In most animals, anti-huFIX neutralizing antibody titers were detected at approximately week 6 and correlated with decreased FIX R338L (SEQ ID NO: 488) expression.

[0717] Safety Assessments

[0718] Animals were monitored for clinical adverse effects. No adverse clinical effects were observed.

### Example 16

### Modified FIX Variants Tested in Mouse Model in AAV Vector Packaged in the Capsid Designated DJ8

[0719] This example repeats experiments described in Example 13; and confirms the previous results in hemophilic mice cohorts, with a vector batch produced de novo, and using two vector doses. Assessments were conducted via modified phenotypic and analysis assays. FIX protein expression and activity in mouse plasma after injection of the recombinant adeno-associated viral vector (rAAV) encoding the modified FIX (mature form encoded by the nucleic acid sequence set forth in SEQ ID NO:490, or SEQ ID NO:394, except that the replacements are in the FIX allele (SEQ ID NO:481) in which residue 148 is A, for expression and packaging in the capsid designated DJ8 (SEQ ID NO:427; Bio-connect, The Netherlands; Grimm et al., J Virol 82:5887-911 (2008)). As in Example 13, the nucleic acid encoding the mature FIX is codon optimized for expression in mice. Expression of the encoded modified FIX was analyzed for comparison with results in Example 14, above. The data show that the use of the capsids, described herein, that have increased tropism for hepatocytes compared to vectors packaged in the capsid DJ/8, as well as including the FIX intron, increases the amount of FIX expressed and the resulting coagulation activity.

[0720] C57BL/6 FIX-deficient mice were injected with rAAV FIX vector packaged with the DJ8 capsid, and FIX expression and coagulation activity was monitored for several weeks. In these experiments, the phenotypic assays to assess FIX activity were modified to demonstrate the difference in biological efficacy between the modified FIX (R318Y, T343R, R338E, T148A) and the R338L FIX (Padua), by assessing clotting time, blood volume loss, and bleeding time.

[0721] A. Cloning of the FIX Gene and rAAV Vector Production

[0722] The FIX gene was cloned and rAAV vectors were prepared as detailed in Example 11, above. Research grade AAV/DJ8 vectors were produced by calcium phosphate co-transfection of HEK-293 human embryonic kidney carcinoma cells with the pAAV plasmid, an adenoviral helper plasmid and chimeric packaging construct that delivers the AAV2 Rep gene and the AAV/DJ8 capsid gene. The AAV particles were purified. Known copy numbers (102-108) of the vector plasmids used to generate the corresponding AAV vectors, carrying the appropriate cDNA were used to generate the standard curves. Purified high-titer AAV vectors were obtained for both vectors modified FIX (R318Y, T343R, R338E, T148A) and the R338L FIX (Padua), at comparable levels, as detailed below:

TABLE 51
Summary of Vector Titers

| | Vol | size | Titer 1 | Titer 2 | Titer 3 | Titer 4 | Avg titer |
|---|---|---|---|---|---|---|---|
| Vector | (μL) | (bp) | (vg/mL) | (vg/mL) | (vg/mL) | (vg/mL) | (vg/mL) |
| FIX-R338L | 300 | 6270 | 7.1E+12 | 6.7E+12 | 7.71E+12 | 5.25E+12 | 6.67E+12 |
| Modified FIX | 305 | 6270 | 1.3E+13 | 1.1E+13 | 9.63E+12 | 9.83E+12 | 1.08E+13 |
| (R318Y, R338E, | | | | | | | |
| T343R, T148A) | | | | | | | |

[0723] B. FIX Protein Expression in Plasma after Intravenous Injection of rAAV-Modified FIX and Padua FIX in a Mouse Model of Hemophilia B

[0724] A colony of FIX hemophilic mice was established and additional breeding for the studies was implemented. The in vivo performances of the two FIX vectors at two difference doses were assessed. The design of the studies was as follows:

Mouse model - Male FIX-KO mouse - 5-6 week-old

| Vector/Condition | Dose 1 | Dose 2 |
|---|---|---|
| rAAV/DJ8sc-AAT-MVM- | 5 × 10⁰⁹ vg/mouse* | 1 × 10¹⁰ vg/mouse* |
| FIXcoPadua-bghpA | 4 mice | 4 mice |
| rAAV/DJ8sc-AAT-MVM- | 5 × 10⁰⁹ vg/mouse* | 1 × 10¹⁰ vg/mouse* |
| Fixico | | |
| (R318Y, R338E, T343R, | 4 mice | 4 mice |
| T148A)-bghpA | | |
| PBS | 4 mice | 4 mice |

Assuming the average mouse weighs about .025 kg (.75 ounces), 5 × 10⁹ vg/mouse is 2 × 10¹¹ vg/kg, and 1 × 10¹⁰ vg/mouse is 4 × 10¹¹ vg/kg

[0725] C57BL/6 F9-deficient mice (4 mice/group) were injected in the tail vein with either 2 E+11 or 4 E+11 vector genomes per kg (vg/kg) of rAAV FIX vector for expressing either modified FIX or Padua FIX, or PBS as a negative control. Whole blood was collected by phlebotomy of the retro orbital plexus at 1, 3, 5, 7, 8, 9, 12, 16 and 20 weeks post-intravenous dosing and plasma was prepared for bioanalytical assays.

[0726] Blood collection was performed at different times post vector injection into these mice. Blood was collected in 1.5 mL Eppendorf tubes containing 20% citrate buffer using non-heparinized capillaries. To obtain the plasma, the blood was centrifuged for 3 min at 13000 rpm. The plasma was aliquoted into 3 tubes, placed on dry ice and stored at −80° C. FIX antigen levels were determined on plasma samples from the mice injected with the vectors and non-injected controls by enzyme-linked immunosorbent assay (Asserachrome IX: Ag Enzyme Immunoassay for Factor FIX; Diagnostica Stago, France) using known concentrations of purified hFIX-R338L-Padua and modified FIX (R318Y, R338E, T343R, T148A) proteins, as respective standards. The FIX activity was measured using an aPTT test as per the manufacturer's instructions (C.K.PREST kit & Start Max; Stago). Plasma from non-injected mice was used as negative control.

[0727] A tail-clipping assay was performed to assess the phenotypic correction. Mice were anesthetized and the tail was placed in pre-warmed 37° C. normal saline solution for 2 minutes and subsequently cut at 2.5-3 mm diameter. Tail was then immediately placed in 37° C. normal saline solution and monitored for bleeding or clotting for 30 minutes. Blood-containing saline was centrifuged at 520 g for 15 min at 4° C. to collect erythrocytes and resuspended in 18 ml of lysis buffer (10 mM KHCO3, 150 mM NH4Cl, 0.1 mM EDTA). Lysis proceeded for 10 minutes at room temperature and samples were centrifuged at 520 g for 10 min at 4° C. OD at 570 nm of supernatants was measured. After the tail clip assay, mice were euthanized, and liver samples were collected from them for further RNA and DNA analysis (ongoing).

[0728] Results

[0729] At both the doses, at the 2 month time point post injection, the modified FIX (R318Y, R338E, T343R; T148A allele) showed a statistically significant 1.1-1.2× improvement in the clotting time compared to FIX Padua (R338L), but produced similar or 1.2× lower (p<0.05) amounts of FIX protein. Taking into consideration the difference in protein levels for the higher dose, then the overall activity resulted in an apparent 1.45 fold improvement when comparing modified FIX (R318Y, R338E, T343R, T148A) with FIX Padua (R338L) under the aPTT assay conditions defined above and a single volume of mouse plasma.

[0730] The results of the tail clip experiment show that, when both vector doses tested for phenotypic correction, the modified FIX (R318Y, R338E, T343R, in the T148A allele) had a statistically significant improvement in the bleeding time and blood loss. The difference in the blood loss is more apparent in the modified tail clip protocol, where the mice are bled for 30 min instead of 10 min.

[0731] C. FIX Activity in Plasma after Intravenous Injection of rAAV-Modified FIX and Padua FIX in a Mouse Model of Hemophilia B

[0732] rAAV-DJ8 FIX vectors encoding the modified FIX (SEQ ID NO: 490; containing the replacements R318Y, R338E, T343R in the T148A allele) and Padua FIX (FIX R338L) were produced as detailed above in Section A and in previous examples. C57BL/6 FIX-deficient mice (4 mice/group) were injected via the tail vein with either 2 E+11 or 4 E+11 vector genomes per kg (vg/kg) of rAAV-DJ8 FIX vector expressing modified FIX or Padua FIX. Two months post injection, blood was collected retro-orbitally, and plasma was prepared for examination of the functional coagulation activity of the modified FIX and Padua FIX.

[0733] FIX activity levels were determined using an activated partial thromboplastin time (aPTT)-based Factor IX single-stage clotting assay as detailed above.

[0734] The results show that FIX activity, as determined by the aPTT-assay, was restored with modified FIX and Padua FIX expression. The modified FIX (R318Y, R338E, T343R, T148A) and Padua FIX (R338L) showed a significant reduction in clotting times compared to vehicle control at both 2 E+11 or 4 E+11 vg/kg. The modified FIX (R318Y, R338E, T343R, T148A) showed a significantly lower clotting time (p<0.05) than Padua FIX (R338L) at both 2 E+11 or 4 E+11 vg/kg dose levels, in spite of producing similar or 1.2 times less FIX protein. After accounting for the difference in protein expression, modified FIX decreased clotting time by approximately 1.45 fold compared to Padua FIX.

[0735] Phenotypic efficacy was assessed using a modified mouse tail-clip assay and recording the blood loss and the bleeding time. Briefly, the mice were anesthetized, and the tails were placed in a pre-warmed saline solution for two minutes and subsequently cut at a 2.5-3 mm diameter. The tails were then immediately returned to the 37° C. saline solution and the bleeding time monitored for 30 minutes. Blood-containing saline was centrifuged at 520 g for 15 minutes at room temperature to collect erythrocytes, which were then resuspended in 18 mL of lysis buffer (10 mM KHCO3, 150 mM NH₄Cl, 0.1 mM EDTA). Lysis proceeded for 10 minutes at room temperature and samples were centrifuged again, at 520 g for 10 minutes at 4° C. The absorbance of the supernatants was measured at 570 nm spectroscopically to determine the amount of hemoglobin as an indication of blood loss.

[0736] The results show that bleeding time was significantly reduced (p<0.001) for both doses of modified FIX and Padua FIX compared to vehicle control. Bleeding time also was significantly reduced (p<0.001) in mice administered both doses of modified FIX compared to mice administered equivalent amounts of Padua FIX. For example, the bleeding time for mice administered 2 E+11 vg/kg modified FIX was approximately 4 minutes, compared to approximately 31 minutes for mice administered Padua FIX. The bleeding time for mice administered 4 E+11 vg/kg modified FIX was approximately 3 minutes, compared to approximately 16 minutes for mice administered Padua FIX. Both concentrations of modified FIX decreased the bleeding time significantly with a p<0.001 compared to the equivalent concentration of Padua FIX.

[0737] The phenotypic correction was performed for both the doses. The modified FIX (R318Y, R338E, T343R, (in the T148A allele)) is superior; it reduces bleeding time (5-8×) and blood loss (3.8-4.1×) compared to the FIX R338L. At both the doses, compared to the PBS control groups the FIX (R318Y, R338E, T343R, in the T148A allele) had a statistically significant decrease in the bleeding time (23 to 27-fold) and blood loss (8.7 to 8.9-fold). The FIX R338L showed a significant decrease of 2.7 to 5.7-fold in bleeding time and 2 to 2.3-fold in blood volume loss compared to the PBS control group. Thus, the vector with the modified capsid effectively delivers FIX; the modified FIX (R318Y, R338E, T343R) is superior to the FIX (R338L).

[0738] Blood loss volume also was significantly reduced in mice administered both rAAV-DJ8 FIX vectors, compared to vehicle control, with modified FIX (R318Y, R338E, T343R, in the T148A allele) inhibiting blood loss more effectively than Padua FIX (R338L). For example, mice administered 2 E+11 vg/kg modified FIX (R318Y, R338E, T343R, in the T148A allele)) lost significantly less blood than mice administered vehicle control (p<0.01) and mice administered 2 E+11 vg/kg Padua FIX (R338L) (p<0.001). Mice administered 4 E+11 vg/kg modified FIX (R318Y, R338E, T343R, in the T148A allele)) also lost significantly less blood than mice administered vehicle control (p<0.001) and mice administered 4 E+11 vg/kg Padua FIX (R338L) (p<0.01). The blood loss was reduced about 4-fold in mice receiving 2 E+11 and 4 E+11 vg/kg of modified FIX compared to Padua FIX. The results are set forth in Table 52 below:

TABLE 52
Average blood loss by testing hemoglobin levels (570 nm)

| Hemoglobin (570 nm) | | | Hemoglobin (570 nm) | | |
|---|---|---|---|---|---|
| (2E+11 vg/kg) | | | (4E+11 vg/kg) | | |
| | | Vehicle | | | Vehicle |
| Modified FIX* | FIX-Padua | (PBS) | FIX* | FIX-Padua | (PBS) |
| 0.04175 ± 0.0048 | 0.1725 ± 0.03 | 0.34225 ± 0.12 | 0.0385 ± 0.003 | 0.1485 ± 0.04 | 0.337 ± 0.08 |

*R318Y/R338E/T343 replacements in the allele with T148A

[0739] D. Conclusion

[0740] Mice administered AAV-DJ8-modified FIX (R318Y, R338E, T343R in the T148A allele; SEQ ID NO:490) and AAV-DJ8-Padua (FIX R338L) have high levels of FIX activity in the one-stage clotting assays following gene therapy, and both FIX proteins showed significantly increased FIX expression and activity compared to vehicle alone. The AAV-modified FIX (R318Y, R338E, T343R, in the T148A allele)) results in a superior reduction in blood loss and decreased bleeding time compared to AAV-FIX R338L. Independently, these two functional approaches confirm that modified FIX (R318Y, R338E, T343R, in the T148A allele)) exhibits superior hemostatic potency compared to Padua FIX (R338L).

### Example 17

### Vector Copy Numbers in Mouse Plasma after Injection of a Recombinant Adeno-Associated Viral Vector (rAAV) Packaged with KP1, Encoding the Modified FIX (R318Y/R338E/T343R), Padua FIX, or a WT-FIX

[0741] In vivo transduction efficiency of each rAAV packaged with the capsid designated KP1 (SEQ ID NO:418), and expressing modified FIX (R318Y/R338E/T343R), Padua FIX, or wild-type FIX, was examined in mice, as detailed in Example 15. C57BL/6 FIX-deficient mice were injected with each rAAV FIX vector packaged with the capsid KP1; huFIX transcript levels and rAAV vector geneome copy numbers were quantified in the livers of animals after sacrifice at week 18 (8 E+11 vg/kg group) or week 16 (8 E+9 vg/kg and 8 E+10 vg/kg groups) post rAAV injection.

[0742] The animals were sacrificed, livers were harvested, and the livers were prepared for analysis by qPCR as detailed above, in Example 13. Data are set forth in Tables 53 and 54, below, as mean±S.D. FIX expression is expressed as fold over actin baseline level. Three technical replicates of each sample were analyzed by qPCR. The results show huFIX transcript levels and AAV vector copy numbers were similar for all constructs, with the exception of animals administered 8 E+11 vg/kg modified (R318Y/R338E/T343R) FIX, which showed statistically significant higher vector copy numbers than wild-type FIX (p=0.025). One mouse from the Padua 8 E+9 vg/kg injection group died one day post injection. Data are set forth in Tables 53 and 54, below:

TABLE 53
Average AAV Vector Copy Numbers

| Vector Copy Number | | | Vector Copy Number | | | Vector Copy Number | | |
|---|---|---|---|---|---|---|---|---|
| (normalized) | | | (normalized) | | | (normalized) | | |
| (8E+11 vg/kg) | | | (8E+10 vg/kg) | | | (8E+9 vg/kg) | | |
| | FIX- | FIX- | | FIX- | FIX- | | FIX- | FIX- |
| FIX* | Padua | WT | FIX* | Padua | WT | FIX* | Padua | WT |
| 1.090 ± | 0.869 ± | 0.815 ± | 0.869 ± | 0.812 ± | 0.073 ± | 0.112 ± | 0.125 ± | 0.116 ± |
| 0.114 | 0.183 | 0.109 | 0.0071 | 0.0146 | 0.0141 | 0.0041 | 0.00297 | 0.0051 |

TABLE 54
FIX Expression

| Transcript levels | | | Transcript levels | | | Transcript levels | | |
|---|---|---|---|---|---|---|---|---|
| (8E+11 vg/kg) | | | (8E+10 vg/kg) | | | (8E+9 vg/kg) | | |
| | FIX- | FIX- | | FIX- | FIX- | | FIX- | FIX- |
| FIX* | Padua | WT | FIX* | Padua | WT | FIX* | Padua | WT |
| 7.180 ± | 6.504 ± | 5.854 ± | 2.214 ± | 3.025 ± | 1.645 ± | 0.0398 ± | 0.072 ± | 0.044 ± |
| 1.279 | 1.009 | 0.407 | 1.084 | 1.297 | 0.798 | 0.021 | 0.0217 | 0.006 |

[0743] The results show that rAAV vector copy numbers and FIX transcript levels were similar between wild-type FIX-, Padua FIX-, and modified FIX-rAAV-injected mice within the same dose groups. Animals injected with modified (R318Y/R338E/T343R) FIX rAAV had the highest huFIX activity levels for all three dose levels.

### Example 18

### FIX Protein Expression and Activity in Cynomolgus Monkey after Injection of a Recombinant Adeno-Associated Viral Vector (rAAV), rAAV-KP1, and the Vector Designated rAAV-LK03, Each Encoding Modified FIX (R318Y/R338E/T343R)

[0744] Expression and activity of modified Factor IX (R318Y/R338E/T343R replacements), intravenously delivered via the AAV-LK03 capsid (Lisowski et al., (2014) Nature 506(7488):382-386) or AAV-KP1 (SEQ ID NO:418), was assessed in blood plasma in a pilot study in cynomolgus monkeys. To test for safety of rAAV infusion, clinical chemistry, hematological assessments, and coagulation also were assessed.

[0745] rAAV-LK03 is a known AAV strain that has been characterized as a strain that efficiently and preferentially transduces human cells, and transduces primary human hepatocytes 100-fold better than AAV8 (Lisowski et al., (2014) Nature 506(7488):382-386; see, e.g., SEQ ID NO:561, which sets forth the LK03 capsid sequence (see, also, U.S. Patent Publication No. 2018/0135076 A1)). The expression of modified FIX, including the intron as described herein is encoded in LK03. AAV vectors containing the capsid LK03 is compared to the vectors containing KP1 capsid described herein. Expression of modified FIX in each of these vectors is compared.

[0746] As in Example 13, the nucleic acid encoding the mature FIX is codon optimized for expression in mice; the optimized codons are very similar (˜90%) to human optimized sequences. The data show that the capsids, described herein, that have increased tropism for human hepatocytes compared to vectors packaged in the capsid DJ/8, as well as including the FIX intron, achieved high initial FIX levels and coagulation activity while maintaining normal clinical chemistry levels and without negatively impacting the health or blood chemistry of the experimental animals.

[0747] A. Identification of Non-Human Primates (NHPs) with Low AAV Neutralization Antibodies Toward rAAV with Capsids LK03 or KP1

[0748] Activation of the immune systems in experimental animals can be an obstacle to efficient and safe in vivo gene transfer via AAV vectors (Mingozzi and High (2013) Blood 122(1):23-36). Anti-AAV neutralizing antibodies produced by experimental animals can impact transduction efficiency of intravenously delivered AAV (Masat et al. (2013) Discov. Med. 15(85):379-389). To address this, non-human primate (NHP) subjects were pre-screened before treatment with AAV to identify animals that have low levels of anti-AAV neutralizing antibodies.

[0749] To examine the natural production of AAV-neutralizing antibodies in NHPs, prior to treatment with AAV, serum from twelve cynomolgus monkeys was collected approximately twenty one days prior to AAV-KP1 and AAV-LK03 injection, and analyzed. Animals producing the lowest levels of AAV-neutralizing antibodies were selected for AAV injection to analyze FIX expression and activity. The procedure for analyzing AAV-neutralizing antibody production was modified from the protocol detailed in Meliani et al. (Human Gene Therapy Methods (2015) 26:45-53).

[0750] 1. Control Experiments Test Lk03 And Kp1 In Vitro Transduction Efficiency

[0751] First, the AAV transduction efficiency of LK03 and KP1 was tested in SNU-387 Hepatocellular carcinoma cells. Cells were seeded on 96-well plates and the next day cells were transduced with 2, 20 or 200 MOI of LK03-luciferase or KP1-luciferase vectors essentially in accord with the protocol set forth in Meliani et al. (Human Gene Therapy Methods (2015) 26:45-53). Twenty-four hours after transduction, luciferase signal was measured. The results show luciferase signal, which is indicative of transduction efficiency, increased with increasing multiplicity of infection (MOI). The signal for LK03 and KP1 was not significantly different, and both vectors efficiently infected SNU-387 cells in these control experiments. The results are set forth as FLuc molecules (log₁₀) in Table 55, below:

TABLE 55
Transduction Efficiency of FLuc rAAV vectors
LK03-FIX and KP1-FIX on SNU-387 Cells

| | LK03 | KP1 |
|---|---|---|
| MOI 200 | 8.17 | 8.535 |
| MOI 20 | 6.86 | 7.29 |
| MOI 2 | 5.66 | 6.23 |

[0752] Next, pooled human intravenous immunoglobulin (IVIG) was used as a control/standard for neutralization of the AAVs LK03 and KP1. AAVs LK03-Luc and KP1-Luc were subject to serial dilution of the IVIG standard control to assess antibody neutralization of the AAV. Data are expressed, in Table 56, as percent luciferase expression normalized to luciferase expression in the absence of IVIG (set to 100, no neutralization). The results show that LK03 and KP1 are neutralized with increasing concentrations of IVIG, as demonstrated by decreasing luciferase expression with increasing IVIG. LK03 is more susceptible to lower concentrations of IVIG, compared to KP 1. The results are set forth in Table 56, below:

TABLE 56
AAV Neutralization by Pooled Human IVIG

| IVIG (μg/mL) | LK03 | KP1 |
|---|---|---|
| 0 | 100 | 100 |
| 20 | 13.65 | 60.74 |
| 40 | 1.73 | 45.68 |
| 60 | 0.25 | 35.25 |
| 80 | 0.13 | 24.79 |
| 100 | 0.04 | 17.7 |
| 125 | 0.02 | 13.06 |
| 150 | 0.01 | 7.07 |
| 200 | 0.02 | 2.9 |
| 300 | 0.02 | 0.51 |

* data represented as percent luciferase expression normalized to luciferase expression in the absence of IVIG (set to 100, no neutralization)

[0753] 2. AAV In Vitro Transduction in the Presence of NHP Serum

[0754] Next, transduction efficiency of AVVs KP1 and LK03 was assessed in SNU-387 cells in the presence of serum collected from 12 non-human primates (NHPs) to identify animals with low AAV neutralizing antibodies. Twenty one days prior to AAV injection, blood was collected from twelve female Cynomolgus monkeys, processed into serum, and monkey serum was heat-inactivated for 30 minutes at 56° C. Monkey sera was then serially diluted in the heat-inactivated FBS (undiluted, 1:2, 1:4, 1:8, 1:16, 1:32, 1:64, 1:128). Next, 30 μL (1.4 E+7 vg) of the AAV-luciferase vector (LK03 or KP1) was incubated with 30 μL of undiluted serum, or a serum dilution (1:2, 1:4, 1:8, 1:16, 1:32, 1:64, 1:128) or a no monkey serum negative control (FBS only) for 1 hour at 37° C. Following incubation, 22.5 μL of each serum-virus mixture was used to transduce SNU-387 cells in duplicates at a MOI of 200. SNU-387 cells had been seeded the day before at 2.5e4 cells/well in a 48 well plate.

[0755] After 24 hours of transfection, cells were rinsed with PBS and 100 μL of Passive Lysis buffer (Promega, Madison, Wis.; Cat. No. E194I) was added to each well. Next, cell lysates were collected, frozen, thawed, and centrifuged. After centrifugation, 20 μL of each clarified supernatant was extracted from the cell lysates and incubated with the luciferase substrate (Promega, Madison, Wis.; Cat. No. E1910) according to manufacturer's instructions, and luminescence was measured on a plate reader.

[0756] Two technical replicates of each sample dilution (or undiluted, or no serum control) were analyzed for luciferase luminescence. Data are expressed, in Tables 57 and 58, as percent luciferase expression normalized to luciferase expression in the absence of serum (set to 100, no neutralization).

[0757] The results show variability in the level of neutralizing antibodies among the different NHPs. When neutralizing antibodies (nAB) are present, low luciferase signal is detected in undiluted serum. Overall, there was a less of a neutralizing effect of pre-existing nAb observed with KP1 compared to LK03. For example, NHP3 had antibodies to LK03, but not to KP1. Animals with high levels of neutralizing antibodies (e.g., NHP2, 4, 8, 10, 11, and 12) were excluded from further study. Animals that showed lower levels of antibody neutralization antibodies (e.g., NHP1, 3, 5, 6, 7, and 9) were used for future experiments to determine the impact of rAAV administration on blood chemistry, coagulation, and FIX expression and activity, detailed below. NHPs 1, 5 and 7 were selected for experiments with rAAV-LK03, and NHPs 3, 6 and 9 were selected for experiments with rAAV-KP1.

[0758] Data are set forth in Tables 57 and 58, below, as a percentage of the no serum control (set to 100):

TABLE 57
Antibody Neutralization of AAV-KP1.

| | NHP Animal Identification Number | | | | | | | | | | | |
|---|---|---|---|---|---|---|---|---|---|---|---|---|
| Dilution | 1 | 2 | 3 | 4 | 5 | 6 | 7 | 8 | 9 | 10 | 11 | 12 |
| No serum | 100 | 100 | 100 | 100 | 100 | 100 | 100 | 100 | 100 | 100 | 100 | 100 |
| 1:128 | 88.82 | 41.87 | 81.38 | 76.56 | 82.97 | 79.54 | 77.52 | 1.23 | 85.18 | 26.81 | 85.74 | 68.35 |
| 1:64 | 92.60 | 19.85 | 102.98 | 60.96 | 92.13 | 85.90 | 88.71 | 0.04 | 91.95 | 9.21 | 88.14 | 61.45 |
| 1:32 | 103.51 | 1.75 | 105.43 | 33.79 | 105.28 | 66.13 | 75.86 | 0.02 | 83.43 | 1.25 | 61.60 | 32.71 |
| 1:16 | 84.62 | 0.05 | 105.09 | 6.73 | 96.11 | 49.34 | 80.08 | 0.01 | 88.10 | 0.13 | 34.22 | 5.27 |
| 1:8 | 79.60 | 0.01 | 108.66 | 0.30 | 99.45 | 23.03 | 83.33 | 0.01 | 84.87 | 0.01 | 11.30 | 0.27 |
| 1:4 | 50.43 | 0.01 | 114.50 | 0.01 | 97.59 | 5.68 | 86.78 | 0.01 | 97.49 | 0.01 | 1.28 | 0.01 |
| 1:2 | 22.63 | 0.01 | 111.44 | 0.01 | 102.79 | 0.66 | 95.16 | 0.01 | 92.52 | 0.01 | 0.17 | 0.01 |
| Undil. | 4.18 | 0.01 | 111.50 | 0.01 | 97.14 | 0.03 | 109.64 | 0.01 | 111.8 | 0.01 | 0.01 | 0.01 |

*NHP animals 3, 6, 9 were selected for further study (cells highlighted in bold, cols. 3, 6, and 9)

TABLE 58
Antibody Neutralization of AAV-LK03

| | NHP Animal Identification Number | | | | | | | | | | | |
|---|---|---|---|---|---|---|---|---|---|---|---|---|
| Dilution | 1 | 2 | 3 | 4 | 5 | 6 | 7 | 8 | 9 | 10 | 11 | 12 |
| No serum | 100 | 100 | 100 | 100 | 100 | 100 | 100 | 100 | 100 | 100 | 100 | 100 |
| 1:128 | 107.12 | 45.02 | 106.50 | 61.60 | 102.69 | 56.08 | 72.44 | 0.01 | 86.64 | 18.08 | 21.72 | 65.14 |
| 1:64 | 111.00 | 13.37 | 111.00 | 26.34 | 108.94 | 47.44 | 83.66 | 0.01 | 82.12 | 4.01 | 5.08 | 36.93 |
| 1:32 | 109.24 | 1.43 | 106.86 | 3.68 | 106.68 | 22.92 | 99.48 | 0.01 | 79.21 | 0.45 | 0.22 | 10.67 |
| 1:16 | 95.89 | 0.04 | 107.23 | 0.10 | 107.26 | 3.89 | 96.11 | 0.01 | 81.99 | 0.02 | 0.02 | 0.43 |
| 1:8 | 55.75 | 0.03 | 103.38 | 0.03 | 111.17 | 0.15 | 90.76 | 0.02 | 79.72 | 0.01 | 0.01 | 0.02 |
| 1:4 | 20.04 | 0.03 | 90.75 | 0.02 | 111.00 | 0.02 | 91.66 | 0.02 | 88.36 | 0.02 | 0.02 | 0.02 |
| 1:2 | 1.50 | 0.03 | 39.53 | 0.03 | 111.50 | 0.02 | 107.46 | 0.02 | 85.87 | 0.02 | 0.02 | 0.02 |
| Undil. | 0.11 | 0.03 | 7.37 | 0.03 | 110.00 | 0.03 | 112 | 0.03 | 82.89 | 0.02 | 0.02 | 0.02 |

*NHP animals 1, 5, 7 were selected for further study (cells highlighted in bold, cols 1, 5, and 7)

[0759] B. Study Comparing AAV Neutralization, Blood Chemistry, FIX Expression and FIX Activity in NHPs Administered rAAV LK03-FIX or rAAV-KP1 FIX

[0760] Animals that showed the lowest levels of AAV-neutralizing antibody production were selected for further experiments; non-human primates (NHP) designated 1, 5, and 7 were selected for intravenous infusion of LK03-FIX, and NHPs 3, 6, and 9 were selected for infusion of KP1-FIX, where FIX was the modified Factor IX (R318Y/R338E/T343R) codon optimized for mouse and containing the partial FIX intron, as detailed above. rAAV was prepared in a liquid formulation for intravenous infusion. AAV-LK03-FIX was a liquid formulation at 2.15 E+12 vg/mL. AAV-KP1-FIX was a liquid formulation at 1.17 E+12 vg/mL.

[0761] Particulars of the experimental groups, including dosage, AAV concentration, volume, and administration route are set forth in Table 59, below:

TABLE 59
Experimental Setup

| | | | Concen- | | | |
|---|---|---|---|---|---|---|
| | | | tration | Volume | | |
| Group | Treatment | Dose | (vg/ml) | (ml/kg) | Route | N |
| 1 | AAV-LK03 | 1.0e12 vg/kg | 2.16e12 | 0.46 | IV | 3 |
| | CB2679d | | | | | |
| 2 | AAV-KP1 | 1.0e12 vg/kg | 1.17e12 | 0.85 | | 3 |
| | CB2679d | | | | | |

[0762] Animals were anesthetized with intramuscular (IM) ketamine HCl (10 mg/kg) and isoflurane prior to all blood collections and intravenous (IV) dosing. rAAV (LK03 or KP1)-FIX was delivered to anesthetized animals through an IV catheter placed into the saphenous or cephalic vein, per laboratory Standard Operating Procedures (SOPs) for Procedures for Injections and Blood Withdrawal for Nonhuman Primates. AAV-LK03 (at 2.16e12 vg/mL) was dosed at 1.0e12 vg/kg NHP body weight (0.46 mL/kg), based on body weights obtained within one week of dosing. AAV-KP1 (1.17e12 vg/mL) was dosed at 1.0e12 vg/kg NHP body weight (0.85 mL/kg). rAAV-FIX was delivered over approximately 15 seconds, and then flushed with approximately 2 mL sterile saline.

[0763] Blood was collected for assessment of AAV neutralization, clinical chemistry, hematological assessments, coagulation, FIX expression, and FIX activity at 7 days prior to AAV infusion, and at days 3, 7, 14, 28, 42, 56 and 84 post-AAV infusion. Blood was collected from the femoral, saphenous, or cephalic veins of sedated animals.

[0764] C. AAV Neutralization in Selected NHPs

[0765] Animals producing the lowest levels of AAV-neutralizing antibodies from the experiments in section A, above, were selected for further analysis during the 12 week time course of the experiment. NHP animal numbers 3, 6 and 9, the animals injected with KP1-AAV vectors, and animal numbers 1, 5 and 7, the animals injected with LK03-AAV vectors, were further characterized.

[0766] 1. Control Experiments Assessing LK03 And KP1 In Vitro Transduction

[0767] Prior to injection of the LK03-FIX and KP1-FIX AAV vectors into the selected NHP animals (NHP numbers 1, 3, 5, 6, 7, 9), transduction efficiencies of the LK03 and KP1 vector preparations were tested again in SNU-387 Hepatocellular carcinoma cells, as detailed above and essentially in accord with the protocol set forth in Meliani et al. ((2015) Human Gene Therapy Methods 26:45-53). Twenty-four hours after transduction, luciferase signal in the cells, which is indicative of transduction efficiency, was measured. The results show that luciferase signal increased with increasing multiplicity of infection (MOI). The signals for LK03-AAV and KP1-AAV were not significantly different; both vectors efficiently infected SNU-387 cells in these control experiments. The results are set forth as FLuc molecules (log₁₀) in Table 60, below:

TABLE 60
Transduction Efficiency of FLuc rAAV vectors
LK03-FIX and KP1-FIX on SNU-387 Cells

| | LK03 | KP1 |
|---|---|---|
| MOI 200 | 8.368 | 8.89 |

[0768] Next, pooled human intravenous immunoglobulin (IVIG) was used as a control/standard for neutralization of the AAVs LK03 and KP1. AAVs LK03-Luc and KP1-Luc were subject to serial dilution of the IVIG standard control, as detailed in section A, above, to assess antibody neutralization of the AAV. Results are set forth in Table 61, where data are presented as percent luciferase expression normalized to luciferase expression in the absence of IVIG (set to 100, no neutralization). These results replicate the initial experiments set forth above and show that LK03 and KP1 are neutralized with increasing concentrations of IVIG, as demonstrated by decreasing luciferase expression with increasing IVIG. LK03 is more susceptible to IVIG neutralization of relative total expression at all concentrations greater than 5 ug/mL, compared to KP 1.

TABLE 61
AAV Neutralization by Pooled Human IVIG

| IVIG (μg/mL) | LK03 | KP1 |
|---|---|---|
| 0 | 100 | 100 |
| 5 | 94.37 | 92.205 |
| 10 | 72.24 | 88.54 |
| 20 | 32.03 | 77.81 |
| 40 | 7.89 | 59.72 |
| 60 | 2.05 | 46.08 |
| 80 | 1.26 | 33.8 |
| 100 | 0.88 | 25.69 |
| 125 | 0.66 | 16.94 |
| 150 | 0.52 | 9.97 |
| 200 | 0.40 | 3.96 |
| 300 | 0.36 | 1.33 |

* data represented as percent luciferase expression normalized to luciferase expression in the absence of IVIG (set to 100, no neutralization)

[0769] 2. KP1 and LK03 AAV In Vitro Transduction in the Presence of NHP Serum Isolated from Animals Weekly, for Eight Weeks

[0770] Next, the presence of AAV neutralizing antibodies during the 8 weeks post-AAV infusion was assessed in NHPs. Twenty-one days prior to AAV injection, blood was collected from the 6 female Cynomolgus monkeys selected above (NHP numbers 1, 3, 5, 6, 7, 9). The blood was processed into serum, and serum was heat-inactivated for 30 minutes at 56° C. Monkey serum then was serially diluted in the heat-inactivated FBS (undiluted, 1:3.16, 1:10, 1:31.6, 1:100, 1:316, 1:1000, 1:3160, 1:10000, 1:31600, 1:100000) or in medium with no serum. Next, 30 μL (1.4 E+7 vg) of the AAV-luciferase vector (LK03 or KP1) was incubated with 30 μL of undiluted serum, or a serum dilution (1:3.16, 1:10, 1:31.6, 1:100, 1:316, 1:1000, 1:3160, 1:10000, 1:31600, 1:100000) or no monkey serum as a negative control (FBS only) for 1 hour at 37° C. Following incubation, 22.5 μL of each serum-virus mixture was used to transduce SNU-387 cells in duplicates at a MOI of 200. SNU-387 cells had been seeded the day before at 2.5e4 cells/well in a 48 well plate.

[0771] After 24 hours of transfection, cells were rinsed with PBS and 100 μL of Passive Lysis buffer (Promega, Madison, Wis.; Cat. No. E194I) was added to each well. Next, cell lysates were collected, frozen, thawed, and centrifuged. After centrifugation, 20 μL of each clarified supernatant was extracted from the cell lysates and incubated with the luciferase substrate (Promega, Madison, Wis.; Cat. No. E1910) according to manufacturer's instructions, and luminescence was measured on a plate reader.

[0772] Two technical replicates of each sample dilution (or undiluted, or no serum control) were analyzed for luciferase luminescence. Data are expressed, in Tables 62-67, as percent luciferase expression normalized to luciferase expression in the absence of serum (set to 100, no neutralization).

[0773] When neutralizing antibodies (nAB) are present, low luciferase signal is detected in undiluted serum. Luciferase signal in serum collected from animals 21 days prior to AAV administration was approximately the same as the no serum control for four animals, two administered LK03 (NHP 5 and 7) and two administered KP1 (NHP 3 and 9). This indicates there were no neutralizing antibodies present in these animals prior to AAV administration. Conversely, NHP 6 (administered KP1) and NHP 1 (administered LK03) showed low luciferase in undiluted serum prior to AAV treatment, indicating the presence of neutralizing antibodies prior to AAV treatment. Following AAV administration, in all animals, luciferase signal was low in undiluted serum at all timepoints from one to seven weeks post-injection, indicating the presence of neutralizing antibodies. Luciferase expression in serially diluted serum elucidated variability in neutralizing antibodies levels among the different NHPs. In all animals administered LK03 (e.g., NHP 1, 5 and 7), luciferase signal decreased slightly one week after LK03-AAV injection in serum diluted 1:3160 and greater, increasing after two weeks to a consistent level that was similar to the pre-treatment values, and was maintained over seven weeks. Animals administered KP1-AAV showed generally higher neutralizing antibody levels than animals administered LK03, and KP1-NHP 3 showed low luciferase expression even at high dilutions, indicating high levels of neutralizing antibodies in this animal.

[0774] Data are set forth in Tables 62-67, below, as a percentage of the no serum control at 21 days prior to treatment (which is set to 100):

TABLE 62
Antibody Neutralization of AAV-KP1 NHP Animal No. 3

| | NHP Animal No. 3 | | | | | | |
|---|---|---|---|---|---|---|---|
| Day | −21 | 7 | 14 | 28 | 42 | 56 | 84 |
| No serum | 100 ± | 99.49 ± | 99.55 ± | 104.8 ± | 95.2 ± | 101.60 ± | 98.41 ± |
| | 3.82 | 1.78 | 0.62 | 4.6 | 5.78 | 4.21 | 2.23 |
| 1:100000 | 101.9 ± | 99.67 ± | 90.12 ± | 110.87 ± | 92.96 ± | 91.34 ± | 89.0 ± |
| | 10.1 | 2.36 | 2.49 | 4.1 | 8.09 | 4.58 | 5.09 |
| 1:31600 | 104.19 ± | 97.9 ± | 87.67 ± | 105.64 ± | 86.0 ± | 80.89 ± | 67.78 ± |
| | 6.17 | 1.79 | 12.43 | 9.93 | 6.62 | 3.31 | 5.81 |
| 1:10000 | 97.95 ± | 89.41 ± | 76.85 ± | 88.86 ± | 58.02 ± | 45.68 ± | 33.88 ± |
| | 4.46 | 5.58 | 5.23 | 6.78 | 3.19 | 3.21 | 5.81 |
| 1:3160 | 98.79 ± | 67.49 ± | 53.44 ± | 41.74 ± | 13.39 ± | 5.95 ± | 3.26 ± |
| | 3.38 | 4.83 | 5.0 | 2.95 | 1.18 | 1.52 | 0.08 |
| 1:1000 | 104.15 ± | 34.39 ± | 12.97 ± | 5.00 ± | 1.71 ± | 1.11 ± | 0.80 ± |
| | 10.99 | 1.86 | 8.56 | 0.21 | 0.15 | 0.05 | 0.04 |
| 1:316 | 102.83 ± | 29.94 ± | 2.11 ± | 5.16 ± | 0.73 ± | 2.14 ± | 0.43 ± |
| | 5.77 | 10.70 | 0.18 | 0.48 | 0.08 | 1.29 | 0.02 |
| 1:100 | 103.25 ± | 23.16 ± | 0.94 ± | 5.31 ± | 0.42 ± | 2.56 ± | 0.28 ± |
| | 2.27 | 2.73 | 0.14 | 0.53 | 0.02 | 2.51 | 0.02 |
| 1:31.6 | 108.13 ± | 27.33 ± | 0.6 ± | 5.41 ± | 0.26 ± | 1.42 ± | 0.20 ± |
| | 1.26 | 9.84 | 0.11 | 1.14 | 0.02 | 1.48 | 0.03 |
| 1:10 | 104.73 ± | 6.5 ± | 0.45 ± | 2.22 ± | 0.18 ± | 2.04 ± | 0.13 ± |
| | 8.67 | 5.42 | 0.11 | 2.62 | 0.01 | 2.22 | 0.00 |
| 1:3.16 | 109.8 ± | 1.26 ± | 0.33 ± | 0.32 ± | 0.13 ± | 0.16 ± | 0.11 ± |
| | 4.0 | 0.24 | 0.6 | 0.25 | 0.0 | 0.09 | 0.01 |
| Undil. | 117.8 ± | 0.67 ± | 0.29 ± | 0.14 ± | 0.11 ± | 0.10 ± | 0.08 ± |
| | 4.06 | 0.06 | 0.20 | 0.01 | 0.01 | 0.01 | 0.01 |

TABLE 63
Antibody Neutralization of AAV-KP1 NHP Animal No. 6

| | NHP Animal No. 6 | | | | | | |
|---|---|---|---|---|---|---|---|
| Day | −25 | 7 | 14 | 28 | 42 | 56 | 84 |
| No serum | 100 ± | 98.74 ± | 101.90 ± | 103.69 ± | 94.47 ± | 100.90 ± | 98.65 ± |
| | 4.92 | 0.22 | 0.40 | 10.21 | 2.03 | 6.48 | 5.08 |
| 1:100000 | 98.48 ± | 104.17 ± | 100.22 ± | 104.85 ± | 101.74 ± | 98.95 ± | 97.86 ± |
| | 2.23 | 1.11 | 3.78 | 9.53 | 6.10 | 3.33 | 3.48 |
| 1:31600 | 99.22 ± | 107.27 ± | 103.01 ± | 112.82 ± | 100.58 ± | 100.90 ± | 89.92 ± |
| | 3.61 | 14.48 | 15.88 | 12.56 | 3.34 | 1.75 | 3.63 |
| 1:10000 | 93.73 ± | 84.73 ± | 84.25 ± | 91.97 ± | 95.56 ± | 101.03 ± | 91.46 ± |
| | 3.26 | 0.42 | 4.20 | 1.46 | 8.36 | 7.82 | 12.21 |
| 1:3160 | 89.01 ± | 47.86 ± | 50.80 ± | 72.73 ± | 73.15 ± | 76.52 ± | 74.24 ± |
| | 11.24 | 0.79 | 3.95 | 2.54 | 2.16 | 1.29 | 3.73 |
| 1:1000 | 92.62 ± | 7.07 ± | 7.24 ± | 23.34 ± | 33.87 ± | 43.44 ± | 31.87 ± |
| | 9.58 | 0.90 | 0.56 | 0.36 | 1.85 | 3.91 | 5.63 |
| 1:316 | 97.12 ± | 1.53 ± | 1.42 ± | 2.98 ± | 4.13 ± | 5.41 ± | 2.98 ± |
| | 4.62 | 0.22 | 0.14 | 0.22 | 0.56 | 0.93 | 0.08 |
| 1:100 | 95.60 ± | 1.16 ± | 0.61 ± | 1.39 ± | 0.95 ± | 1.37 ± | 0.95 ± |
| | 5.25 | 0.55 | 0.04 | 0.37 | 0.04 | 0.34 | 0.08 |
| 1:31.6 | 72.66 ± | 1.47 ± | 0.35 ± | 1.53 ± | 0.53 ± | 0.96 ± | 0.50 ± |
| | 2.43 | 1.64 | 0.03 | 1.44 | 0.03 | 0.55 | 0.05 |
| 1:10 | 33.29 ± | 0.48 ± | 0.23 ± | 0.48 ± | 0.33 ± | 0.41 ± | 0.32 ± |
| | 1.18 | 0.25 | 0.00 | 0.12 | 0.04 | 0.07 | 0.02 |
| 1:3.16 | 4.88 ± | 0.19 ± | 0.18 ± | 0.25 ± | 0.25 ± | 0.26 ± | 0.23 ± |
| | 0.32 | 0.01 | 0.02 | 0.01 | 0.01 | 0.04 | 0.01 |
| Undil. | 1.33 ± | 0.13 ± | 0.13 ± | 0.21 ± | 0.20 ± | 0.19 ± | 0.18 ± |
| | 0.08 | 0.03 | 0.02 | 0.01 | 0.02 | 0.01 | 0.00 |

TABLE 64
Antibody Neutralization of AAV-KP1 NHP Animal No. 9

| | NHP Animal No. 9 | | | | | | |
|---|---|---|---|---|---|---|---|
| Day | −25 | 7 | 14 | 28 | 42 | 56 | 84 |
| No serum | 100.00 ± | 104.79 ± | 95.21 ± | 98.62 ± | 100.57 ± | 101.41 ± | 98.59 ± |
| | 9.47 | 6.75 | 3.68 | 4.19 | 6.81 | 5.97 | 11.81 |
| 1:100000 | 104.10 ± | 119.40 ± | 97.65 ± | 93.71 ± | 89.38 ± | 109.47 ± | 99.52 ± |
| | 10.38 | 2.73 | 7.16 | 11.63 | 5.35 | 11.14 | 6.20 |
| 1:31600 | 96.00 ± | 114.79 ± | 99.02 ± | 96.52 ± | 98.24 ± | 118.47 ± | 99.08 ± |
| | 5.82 | 7.47 | 3.25 | 8.59 | 10.11 | 12.62 | 4.38 |
| 1:10000 | 98.68 ± | 120.54 ± | 98.14 ± | 94.75 ± | 81.59 ± | 99.04 ± | 90.76 ± |
| | 10.10 | 11.15 | 8.06 | 10.23 | 8.04 | 5.69 | 3.13 |
| 1:3160 | 99.05 ± | 112.79 ± | 102.95 ± | 88.53 ± | 70.36 ± | 63.74 ± | 64.94 ± |
| | 6.23 | 6.88 | 2.11 | 14.30 | 4.21 | 4.13 | 0.49 |
| 1:1000 | 96.10 ± | 112.60 ± | 96.90 ± | 72.37 ± | 31.45 ± | 13.17 ± | 19.11 ± |
| | 5.95 | 1.96 | 3.96 | 5.32 | 1.09 | 8.09 | 1.21 |
| 1:316 | 100.92 ± | 94.01 ± | 85.47 ± | 35.25 ± | 4.63 ± | 2.55 ± | 2.03 ± |
| | 2.62 | 6.61 | 4.77 | 3.27 | 0.27 | 0.45 | 0.17 |
| 1:100 | 101.99 ± | 44.72 ± | 49.66 ± | 4.80 ± | 1.01 ± | 1.81 ± | 0.75 ± |
| | 4.41 | 2.22 | 1.90 | 1.45 | 0.03 | 0.99 | 0.08 |
| 1:31.6 | 100.03 ± | 19.36 ± | 14.67 ± | 6.14 ± | 0.52 ± | 4.46 ± | 0.44 ± |
| | 5.92 | 2.13 | 1.03 | 8.01 | 0.03 | 6.21 | 0.07 |
| 1:10 | 101.90 ± | 4.69 ± | 1.98 ± | 1.42 ± | 0.34 ± | 0.94 ± | 0.29 ± |
| | 5.19 | 2.84 | 0.15 | 1.05 | 0.03 | 0.75 | 0.04 |
| 1:3.16 | 105.98 ± | 0.87 ± | 0.83 ± | 0.31 ± | 0.25 ± | 0.23 ± | 0.21 ± |
| | 4.36 | 0.12 | 0.06 | 0.32 | 0.02 | 0.03 | 0.02 |
| Undil. | 109.07 ± | 0.57 ± | 0.54 ± | 0.27 ± | 0.21 ± | 0.14 ± | 0.16 ± |
| | 5.87 | 0.04 | 0.03 | 0.03 | 0.03 | 0.01 | 0.02 |

TABLE 65
Antibody Neutralization of AAV-LK03 NHP Animal No. 1

| | NHP Animal No. 1 | | | | | | |
|---|---|---|---|---|---|---|---|
| Day | −25 | 7 | 14 | 28 | 42 | 56 | 84 |
| No serum | 100 ± | 92.62 ± | 107.38 ± | 98.29 ± | 101.72 ± | 98.31 ± | 101.69 ± |
| | 3.95 | 1.97 | 3.21 | 6.36 | 0.33 | 1.50 | 1.12 |
| 1:100000 | 114.79 ± | 112.02 ± | 124.92 ± | 116.55 ± | 119.34 ± | 108.99 ± | 120.02 ± |
| | 4.96 | 21.16 | 10.56 | 5.62 | 8.47 | 15.40 | 1.45 |
| 1:31600 | 121.21 ± | 107.66 ± | 125.05 ± | 119.15 ± | 126.18 ± | 111.48 ± | 119.76 ± |
| | 12.50 | 7.96 | 6.42 | 3.55 | 3.67 | 9.70 | 6.19 |
| 1:10000 | 113.32 ± | 96.70 ± | 124.15 ± | 117.27 ± | 123.05 ± | 122.00 ± | 116.23 ± |
| | 3.44 | 12.96 | 0.44 | 5.95 | 7.16 | 11.38 | 5.90 |
| 1:3160 | 117.76 ± | 96.50 ± | 116.94 ± | 128.06 ± | 107.56 ± | 122.22 ± | 117.90 ± |
| | 10.46 | 16.93 | 7.24 | 3.01 | 5.22 | 12.85 | 15.26 |
| 1:1000 | 122.83 ± | 48.35 ± | 80.89 ± | 108.93 ± | 114.28 ± | 112.45 ± | 107.92 ± |
| | 13.04 | 7.43 | 4.38 | 7.09 | 13.41 | 10.40 | 8.46 |
| 1:316 | 120.93 ± | 7.61 ± | 25.35 ± | 68.33 ± | 83.44 ± | 92.00 ± | 89.46 ± |
| | 11.08 | 0.98 | 2.23 | 2.59 | 0.37 | 5.55 | 11.19 |
| 1:100 | 113.07 ± | 1.21 ± | 2.21 ± | 14.96 ± | 34.09 ± | 40.23 ± | 48.07 ± |
| | 12.41 | 0.10 | 0.19 | 1.50 | 1.69 | 4.81 | 0.96 |
| 1:31.6 | 98.97 ± | 0.65 ± | 0.72 ± | 2.01 ± | 3.16 ± | 4.25 ± | 6.00 ± |
| | 18.57 | 0.08 | 0.04 | 0.04 | 0.58 | 0.38 | 0.26 |
| 1:10 | 64.45 ± | 0.39 ± | 0.43 ± | 0.92 ± | 0.87 ± | 1.21 ± | 1.19 ± |
| | 13.60 | 0.02 | 0.02 | 0.04 | 0.08 | 0.08 | 0.04 |
| 1:3.16 | 15.19 ± | 0.28 ± | 0.27 ± | 0.54 ± | 0.52 ± | 0.71 ± | 0.66 ± |
| | 5.30 | 0.02 | 0.02 | 0.05 | 0.06 | 0.04 | 0.02 |
| Undil. | 1.77 ± | 0.22 ± | 0.19 ± | 0.48 ± | 0.43 ± | 0.52 ± | 0.48 ± |
| | 0.06 | 0.02 | 0.01 | 0.02 | 0.06 | 0.04 | 0.02 |

TABLE 66
Antibody Neutralization of AAV-LK03 NHP Animal No. 5

| | NHP Animal No. 5 | | | | | | |
|---|---|---|---|---|---|---|---|
| Day | −25 | 7 | 14 | 28 | 42 | 56 | 84 |
| No serum | 100 ± | 95.03 ± | 104.98 ± | 95.74 ± | 104.27 ± | 99.02 ± | 100.99 ± |
| | 5.01 | 7.39 | 1.42 | 5.75 | 8.77 | 2.43 | 1.22 |
| 1:100000 | 133.40 ± | 115.37 ± | 129.14 ± | 112.24 ± | 116.36 ± | 120.78 ± | 139.91 ± |
| | 5.34 | 19.17 | 10.17 | 11.15 | 17.11 | 9.92 | 11.35 |
| 1:31600 | 133.05 ± | 121.70 ± | 124.16 ± | 103.97 ± | 110.48 ± | 119.20 ± | 132.19 ± |
| | 7.73 | 14.01 | 8.11 | 2.28 | 12.81 | 9.03 | 20.65 |
| 1:10000 | 126.94 ± | 109.71 ± | 116.83 ± | 95.16 ± | 91.47 ± | 111.61 ± | 124.80 ± |
| | 6.50 | 7.35 | 8.16 | 9.28 | 9.56 | 8.91 | 11.92 |
| 1:3160 | 118.97 ± | 109.02 ± | 86.11 ± | 46.62 ± | 58.15 ± | 70.28 ± | 93.04 ± |
| | 2.17 | 10.30 | 5.09 | 10.04 | 6.98 | 13.14 | 1.79 |
| 1:1000 | 119.95 ± | 89.75 ± | 38.02 ± | 8.5 ± | 9.30 ± | 18.12 ± | 43.78 ± |
| | 16.21 | 8.06 | 1.52 | 1.01 | 1.49 | 4.13 | 2.40 |
| 1:316 | 123.45 ± | 39.89 ± | 5.11 ± | 1.26 ± | 1.21 ± | 1.53 ± | 4.39 ± |
| | 5.35 | 2.14 | 0.32 | 0.09 | 0.05 | 0.21 | 0.65 |
| 1:100 | 127.31 ± | 6.82 ± | 1.26 ± | 0.64 ± | 0.58 ± | 0.79 ± | 1.23 ± |
| | 11.72 | 1.25 | 0.02 | 0.05 | 0.04 | 0.04 | 0.02 |
| 1:31.6 | 128.06 ± | 1.32 ± | 0.59 ± | 0.36 ± | 0.31 ± | 0.49 ± | 0.63 ± |
| | 6.39 | 0.16 | 0.04 | 0.02 | 0.02 | 0.05 | 0.10 |
| 1:10 | 126.94 ± | 0.66 ± | 0.49 ± | 0.26 ± | 0.26 ± | 0.36 ± | 0.43 ± |
| | 13.04 | 0.03 | 0.02 | 0.04 | 0.02 | 0.02 | 0.03 |
| 1:3.16 | 129.12 ± | 0.45 ± | 0.3 ± | 0.18 ± | 0.20 ± | 0.28 ± | 0.29 ± |
| | 13.36 | 0.04 | 0.03 | 0.02 | 0.04 | 0.01 | 0.05 |
| Undil. | 129.24 ± | 0.32 ± | 0.25 ± | 0.16 ± | 0.14 ± | 0.22 ± | 0.19 ± |
| | 11.05 | 0.02 | 0.04 | 0.01 | 0.02 | 0.02 | 0.02 |

TABLE 67
Antibody Neutralization of AAV-LK03 NHP Animal No. 7

| | NHP Animal No. 7 | | | | | | |
|---|---|---|---|---|---|---|---|
| Day | −25 | 7 | 14 | 28 | 42 | 56 | 84 |
| No serum | 100 ± | 95.92 ± | 104.09 ± | 101.13 ± | 98.88 ± | 102.22 ± | 97.78 ± |
| | 0.78 | 8.03 | 4.12 | 2.48 | 5.34 | 3.44 | 13.73 |
| 1:100000 | 119.02 ± | 109.83 ± | 96.78 ± | 113.121 ± | 109.17 ± | 113.31 ± | 121.92 ± |
| | 7.44 | 6.48 | 8.50 | 17.42 | 8.45 | 6.72 | 16.14 |
| 1:31600 | 123.43 ± | 111.08 ± | 102.49 ± | 105.52 ± | 110.11 ± | 118.80 ± | 122.97 ± |
| | 8.71 | 8.51 | 10.74 | 8.38 | 11.67 | 13.98 | 15.28 |
| 1:10000 | 128.09 ± | 110.09 ± | 100.05 ± | 107.56 ± | 111.04 ± | 119.69 ± | 116.47 ± |
| | 5.12 | 2.57 | 14.33 | 12.16 | 10.80 | 6.18 | 12.93 |
| 1:3160 | 132.35 ± | 92.29 ± | 98.07 ± | 105.47 ± | 116.96 ± | 121.87 ± | 124.78 ± |
| | 11.75 | 0.92 | 13.14 | 6.31 | 6.29 | 12.15 | 9.40 |
| 1:1000 | 123.16 ± | 68.99 ± | 86.95 ± | 99.29 ± | 115.37 ± | 112.82 ± | 121.66 ± |
| | 4.32 | 2.89 | 7.95 | 2.23 | 3.03 | 15.13 | 9.37 |
| 1:316 | 121.76 ± | 27.87 ± | 67.01 ± | 92.11 ± | 98.51 ± | 101.95 ± | 110.25 ± |
| | 5.89 | 0.78 | 6.74 | 1.10 | 7.52 | 6.03 | 1.34 |
| 1:100 | 125.07 ± | 3.41 ± | 21.09 ± | 67.46 ± | 71.05 ± | 75.46 ± | 82.17 ± |
| | 4.79 | 0.35 | 4.21 | 2.40 | 6.49 | 10.08 | 7.51 |
| 1:31.6 | 130.03 ± | 0.99 ± | 2.04 ± | 16.79 ± | 23.80 ± | 20.82 ± | 26.85 ± |
| | 2.36 | 0.09 | 0.61 | 3.47 | 2.24 | 4.64 | 1.49 |
| 1:10 | 124.54 ± | 0.52 ± | 0.65 ± | 2.06 ± | 2.25 ± | 2.38 ± | 2.94 ± |
| | 6.51 | 0.03 | 0.02 | 0.29 | 0.15 | 0.16 | 0.17 |
| 1:3.16 | 141.34 ± | 0.37 ± | 0.41 ± | 0.82 ± | 0.90 ± | 1.03 ± | 1.07 ± |
| | 3.23 | 0.04 | 0.01 | 0.03 | 0.11 | 0.05 | 0.10 |
| Undil. | 133.47 ± | 0.26 ± | 0.27 ± | 0.60 ± | 0.59 ± | 0.68 ± | 0.78 ± |
| | 11.77 | 0.02 | 0.04 | 0.07 | 0.02 | 0.07 | 0.06 |

[0775] 3. Anti-Drug Antibodies

[0776] Assays for anti-drug antibodies (ADAs) were conducted to aid in assessing any immune response to modified FIX in NHPs administered AAV-KP1-FIX and AAV-LK03-FIX. Citrated plasma was prepared from blood, and FIX concentration in plasma was determined using a bridging electro-chemiluminescent immunoassay (ECLIA) using Meso Scale Discovery (MSD) technology. ECLIA is similar to ELISA, but uses an electrochemiluminesent signal rather than a colorimetric reaction. Biotin-conjugated modified (R318Y/R338E/T343R) FIX at 500 ng/mL was added to a streptavidin-coated assay plate. Plasma samples were diluted in acetic acid solution (AAWS) to a minimum required dilution of 1/10, and then added to the plate. Ruthenium-conjugated (sulfo-tagged) modified (R318Y/R338E/T343R) FIX, which produces light upon application of an electrical potential, was then added at 500 ng/mL. Any drug-antibody-drug complexes remaining after the plate was washed were detected in relative light units (RLU) on an MSD SECTOR™ Imager 600 reader (Meso Scale Diagnostics, LLC. Rockville, Md.). A positive signal above background reflect the presence of anti-FIX antibodies in the sample.

[0777] In this assay, the negative control is 1/10 diluted pooled monkey plasma in AAWS. The plate specific cut point (PSCP) was the sum of the RLU of the negative control RLU and the pre-defined screening cut-point factor (here 9 RLU), which was defined during method validation. Samples were considered positive if their mean RLU was greater than or equal to the PSCP.

[0778] Samples spiked with a 25 μg/mL solution of modified FIX (R318Y/R338E/T343R) in AAWS or those substituted with an equivalent volume of AAWS prior to addition to the MSD plate served as additional controls. Added modified FIX (R318Y/R338E/T343R) competes with the ability of sample ADAs to bind the capture and the detection of the modified FIX. A positive sample was identified as a spiked sample with a minimum percent inhibition of RLU signal of 15.6% compared to its unspiked pair, where the unspiked sample signal was one that remained above the PSCP.

[0779] The results show two animals administered LK03 (NHP 5 and 1) and two administered KP1 (NHP 3 and 9) showed high chemiluminescence signal, indicating high levels of anti-FIX antibodies. Positive signals were first detected at study day 28 for both LK03-FIX and KP1-FIX and generally increased in signal intensity over time. NHP 7, which was administered LK03-FIX, and NHP 6, which was administered KP1-FIX, did not show an increase of chemiluminescence over time, indicating that anti-FIX antibodies did not develop over the 13 week course of the experiment. The results are set forth in Table 68, below:

TABLE 68
Electrochemiluminesent signal results from ADA assay

| | Day | | | | | | | | | | |
|---|---|---|---|---|---|---|---|---|---|---|---|
| NHP No. | −7 | 0 | 3 | 7 | 14 | 28 | 42 | 56 | 84 | 98 | AAV |
| 5 | 72 | 68 | 73 | 74 | 77 | 100 | 1722 | 8550 | 18061 | 15195 | LK03 |
| 7 | 76 | 68 | 74 | 72 | 73 | 73 | 82 | 78 | 100 | 92 | |
| 1 | 76 | 78 | 75 | 78 | 92 | 89 | 97 | 146 | 7871 | 16199 | |
| 3 | 62 | 61 | 61 | 71 | 74 | 74 | 74 | 87 | 1796 | 8546 | KP1 |
| 6 | 68 | 68 | 71 | 68 | 76 | 64 | 67 | 62 | 74 | 78 | |
| 9 | 71 | 70 | 70 | 69 | 81 | 2254 | 15306 | 21593 | n/d | 9876 | |

*NHP animals 1, 3, 5, and 9 had positive confirmatory testing results for ADA presence (cells highlighted in bold)

[0780] 4. Clinical Chemistry

[0781] For clinical chemistry analyses, approximately 1 mL whole blood was collected from each animal 7 days prior to AAV infusion, the day of infusion (day 0), and at days 3, 7, 14, 28, 42, 56 and 84 post-infusion. Blood samples were allowed to clot at room temperature for at least 15 minutes and up to two hours prior to centrifugation and then loaded into a serum separator or clot tube and centrifuged at 2500×g for 10 minutes at room temperature to separate into cellular and serum fractions. Samples were analyzed on a Roche/Hitachi Cobas Clinical Chemistry System (Roche Diagnostics, Indianapolis, Ind.) per laboratory SOP (Routine Operation of the Roche/Hitachi cobas c501 Chemistry Analyzer) in accord with manufacturer's instructions.

[0782] The serum chemistry results show that animals were similarly unaffected by administration of rAAV-LK03 and rAAV-KP1; serum chemistry remained stable before and after AAV administration and were within normal ranges for NHPs, with a few exceptions. Alanine Aminotransferase (Alanine Transaminase) levels were higher in animals administered KP1 compared to LK03; notably, these animals displayed higher average baseline levels of these enzymes prior to administration of KP1 compared to animals administered LK03. This indicates that the higher levels are not entirely be due to AAV administration. In another example, Gamma-Glutamyltransferase levels were higher in a single animal that had pre-existing nAbs. In another example, Alkaline Phosphatase levels were higher in animals administered LK03 compared to KP1; these animals also displayed higher average baseline levels of the enzyme prior to administration of LK03 compared to animals administered KP1 indicating that the higher levels are not entirely due to AAV administration. A selected group of serum chemistry parameters (Alanine Aminotransferase (Alanine Transaminase), Aspartate Aminotransferase (Aspartate Transaminase), and Gamma Glutamyltransferase) were analyzed relative to levels at 7 days prior to AAV infusion. The results of these normalized results show a steady level of these enzymes with rAAV-LK03 and rAAV-KP1, with a slight increase in Alanine Aminotransferase (Alanine Transaminase) with both AAVs.

[0783] Individual animal results for a subset of analyses are set forth in Table 71 and 73 and distinguish inter-animal variability within groups of animals administered KP1 or LK03. The results show that although there was some minor variability in serum chemistry results between animals, these differences did not appear significant indicating that KP1-AAV and LK03-AAV were well-tolerated.

[0784] The clinical chemistry parameters assessed are set forth in Table 69; the serum chemistry results, expressed as an average of the three animals for each group, are set forth in Table 70; and the select enzyme normalized to pretreatment with rAAVs are set forth in Table 72. Tables 69-74 are set forth below:

TABLE 69
Serum Chemistry Results

| Analyte | Abbreviation | Units |
|---|---|---|
| Alanine Aminotransferase | ALT | IU/L |
| (Alanine Transaminase) | | |
| Albumin (ALB) | ALB | g/dL |
| Alkaline Phosphatase (ALP) | ALP | IU/L |
| Aspartate Aminotransferase | AST | IU/L |
| (Aspartate Transaminase) | | |
| Bilirubin (Total) | BILI-T | mg/dL |
| Blood Urea Nitrogen | BUN | mg/dl |
| Chloride | CL-S | mmol/L |
| Creatinine | CRE-S | mg/dL |
| Glucose | GLU | mg/dL |
| Gamma Glutamyltransferase | GGT | IU/L |
| Lactate Dehydrogenase | LDH | IU/L |
| Phosphorous | | mg/dL |
| Potassium | K-S | mmol/L |
| Protein (Total) (TP) | TP | g/dL |
| Sodium | NA-S | mmol/L |
| Calculated Parameters and Ratios | | |
| Albumin/Globulin | A/G | None |
| Blood Urea Nitrogen/Creatinine | BUN/CRE | None |
| Globulin (GLOB) | GLOBN | g/dL |

TABLE 70
Serum Chemistry Results

| | Day | | | | | | | | | |
|---|---|---|---|---|---|---|---|---|---|---|
| Analyte | −7 | 0 | 3 | 7 | 14 | 28 | 42 | 56 | 84 | AAV |
| Alanine | 20.67 | 23.00 | 26.00 | 52.67 | 45.67 | 37.33 | 45.67 | 39.67 | 42.00 | LK03 |
| Aminotransferase | 40.67 | 46.67 | 38.00 | 97.00 | 86.33 | 63.00 | 65.33 | 81.67 | 78.00 | KP1 |
| (Alanine | | | | | | | | | | |
| Transaminase) | | | | | | | | | | |
| | 4.00 | 4.00 | 4.00 | 4.00 | 4.27 | 4.20 | 4.43 | 4.50 | 4.07 | LK03 |

TABLE 70
Serum Chemistry Results

| | Day | | | | | | | | | |
|---|---|---|---|---|---|---|---|---|---|---|
| | −7 | 0 | 3 | 7 | 14 | 28 | 42 | 56 | 84 | AAV |
| Analyte | | | | | | | | | | |
| Albumin (ALB) | 3.67 | 4.00 | 3.33 | 4.00 | 4.13 | 4.13 | 4.17 | 4.30 | 3.87 | KP1 |
| Alkaline | 231.67 | 186.00 | 189.00 | 219.67 | 210.33 | 207.67 | 252.00 | 242.33 | 226.67 | LK03 |
| Phosphatase (ALP) | 157.00 | 157.33 | 135.00 | 159.33 | 148.33 | 166.67 | 156.67 | 194.67 | 158.00 | KP1 |
| Aspartate | 43.67 | 52.00 | 45.33 | 54.33 | 45.00 | 45.67 | 58.00 | 59.33 | 50.00 | LK03 |
| Aminotransferase | 43.00 | 52.33 | 50.33 | 50.00 | 39.67 | 41.00 | 46.33 | 50.00 | 50.67 | KP1 |
| (Aspartate | | | | | | | | | | |
| Transaminase) | | | | | | | | | | |
| Bilirubin (Total) | 0.20 | 0.20 | 0.20 | 0.20 | 0.15 | 0.15 | 0.20 | 0.15 | 0.15 | LK03 |
| | 0.20 | 0.20 | 0.20 | 0.20 | 0.15 | 0.15 | 0.20 | 0.15 | 0.15 | KP1 |
| Blood Urea | 15.33 | 21.00 | 17.00 | 18.00 | 20.67 | 20.67 | 18.00 | 23.00 | 18.33 | LK03 |
| Nitrogen | 13.67 | 18.00 | 14.00 | 12.67 | 18.33 | 14.67 | 14.33 | 15.67 | 15.67 | KP1 |
| Chloride | 106.00 | 106.00 | 103.00 | 105.67 | 104.67 | 105.67 | 105.00 | 109.00 | 105.33 | LK03 |
| | 107.67 | 110.67 | 106.33 | 106.67 | 105.33 | 106.67 | 108.00 | 110.33 | 104.00 | KP1 |
| Creatinine | 0.67 | 1.00 | 0.67 | 1.00 | 0.60 | 0.57 | 0.60 | 0.67 | 0.63 | LK03 |
| | 1.00 | 1.00 | 1.00 | 1.00 | 0.73 | 0.67 | 0.70 | 0.83 | 0.73 | KP1 |
| Glucose | 75.67 | 53.33 | 55.33 | 65.00 | 74.67 | 67.00 | 52.00 | 72.00 | 67.00 | LK03 |
| | 71.00 | 59.67 | 55.00 | 65.67 | 77.67 | 75.00 | 55.00 | 80.00 | 76.00 | KP1 |
| Gamma | 56.00 | 52.33 | 47.67 | 57.00 | 57.00 | 56.00 | 59.00 | 62.00 | 58.67 | LK03 |
| Glutamyltransferase | 71.33 | 68.67 | 64.00 | 74.67 | 75.00 | 77.00 | 74.67 | 81.00 | 77.67 | KP1 |
| Lactate | 456.33 | 486.00 | 538.67 | 553.00 | 451.33 | 542.33 | 562.33 | nd | nd | LK03 |
| Dehydrogenase | 551.67 | 677.33 | 722.67 | 546.00 | 415.33 | 559.67 | 658.33 | nd | nd | KP1 |
| Phosphorus | 4.67 | 4.33 | 4.33 | 5.33 | 24.37 | 4.47 | 5.20 | 5.47 | 4.77 | LK03 |
| | 5.00 | 5.00 | 4.33 | 6.00 | 4.67 | 5.20 | 5.10 | 6.40 | 6.20 | KP1 |
| Potassium | 3.33 | 4.00 | 3.67 | 3.67 | 3.60 | nd | 3.60 | 3.80 | 3.50 | LK03 |
| | 3.67 | 3.67 | 3.67 | 3.67 | 3.60 | nd | 3.33 | 3.90 | 3.60 | KP1 |
| Protein (Total) (TP) | 6.33 | 6.33 | 6.00 | 7.00 | 7.20 | 6.87 | 7.40 | 7.83 | 7.10 | LK03 |
| | 6.33 | 7.00 | 6.00 | 7.00 | 7.03 | 6.90 | 7.07 | 7.60 | 6.87 | KP1 |
| Sodium | 146.67 | 149.33 | 142.00 | 146.67 | 145.33 | 146.33 | 147.33 | 155.33 | 144.67 | LK03 |
| | 149.00 | 152.00 | 144.33 | 147.00 | 145.67 | 147.67 | 149.00 | 156.33 | 145.67 | KP1 |
| Calculated Parameters | | | | | | | | | | |
| and Ratios | | | | | | | | | | |
| Albumin/Globulin | 1.67 | 1.33 | 1.67 | 1.67 | 1.47 | 1.60 | 1.50 | 1.37 | 1.37 | LK03 |
| | 1.67 | 1.67 | 1.33 | 1.67 | 1.47 | 1.53 | 1.50 | 1.30 | 1.30 | KP1 |
| Blood Urea | 30.00 | 39.33 | 37.00 | 30.33 | 34.67 | 37.33 | 30.67 | 34.33 | 29.33 | LK03 |
| Nitrogen/Creatinine | 22.00 | 32.33 | 27.33 | 20.00 | 26.67 | 22.67 | 22.00 | 19.67 | 21.33 | KP1 |
| Globulin (GLOB) | 2.33 | 3.00 | 2.33 | 3.00 | 2.93 | 2.67 | 2.97 | 3.33 | 3.03 | LK03 |
| | 2.33 | 3.00 | 2.67 | 2.67 | 2.90 | 2.77 | 2.90 | 3.30 | 3.00 | KP1 |

TABLE 71
Select Results for Individual Animals

| | Day | | | | | | | | | | |
|---|---|---|---|---|---|---|---|---|---|---|---|
| Analyte | NHP No. | −7 | 0 | 3 | 7 | 14 | 28 | 42 | 56 | 84 | AAV |
| Lactate | 5 | 387 | 459 | 400 | 412 | 414 | 462 | 595 | nd | nd | LK03 |
| Dehydrogenase | 7 | 232 | 385 | 324 | 387 | 295 | 441 | 486 | nd | nd | |
| | 1 | 750 | 614 | 892 | 860 | 645 | 724 | 606 | nd | nd | |
| | 3 | 436 | 468 | 332 | 400 | 363 | 396 | 421 | nd | nd | KP1 |
| | 6 | 619 | 643 | 668 | 568 | 449 | 533 | 620 | nd | nd | |
| | 9 | 600 | 921 | 1168 | 670 | 434 | 750 | 934 | nd | nd | |
| Globulin | 5 | 2.2 | 2.8 | 2.3 | 3.0 | 3.1 | 2.6 | 3.1 | 3.3 | 2.9 | LK03 |
| | 7 | 2.4 | 2.7 | 2.2 | 2.6 | 2.6 | 2.4 | 2.5 | 3.0 | 2.7 | |
| | 1 | 3.0 | 2.6 | 2.6 | 3.0 | 3.1 | 3.0 | 3.3 | 3.7 | 3.5 | |
| | 3 | 3.4 | 3.0 | 3.1 | 3.4 | 3.6 | 3.3 | 3.6 | 3.7 | 3.4 | KP1 |
| | 6 | 2.3 | 2.7 | 2.8 | 2.7 | 2.8 | 2.7 | 2.7 | 3.2 | 2.9 | |
| | 9 | 1.9 | 2.6 | 2.0 | 2.2 | 2.3 | 2.3 | 2.4 | 3.0 | 2.7 | |
| Alkaline | 5 | 85 | 87 | 80 | 96 | 88 | 84 | 104 | 101 | 86 | LK03 |
| Phosphatase | 7 | 287 | 233 | 239 | 280 | 277 | 285 | 366 | 366 | 331 | |
| (ALP) | 1 | 323 | 238 | 248 | 283 | 266 | 254 | 286 | 260 | 263 | |
| | 3 | 91 | 80 | 82 | 88 | 85 | 105 | 89 | 170 | 99 | KP1 |
| | 6 | 156 | 147 | 111 | 143 | 141 | 159 | 139 | 176 | 153 | |
| | 9 | 224 | 245 | 212 | 247 | 219 | 236 | 242 | 238 | 222 | |

TABLE 72
Normalized Serum Chemistry Results

| | Day | | | | | | | | | |
|---|---|---|---|---|---|---|---|---|---|---|
| Analyte | −7 | 0 | 3 | 7 | 14 | 28 | 42 | 56 | 84 | AAV |
| Alanine | 1.00 | 1.13 | 1.30 | 2.53 | 2.20 | 1.80 | 2.23 | 1.90 | 2.03 | LK03 |
| Aminotransferase | 1.00 | 1.13 | 0.90 | 2.37 | 2.10 | 1.57 | 1.60 | 2.03 | 1.90 | KP1 |
| (Alanine | | | | | | | | | | |
| Transaminase) | | | | | | | | | | |
| Aspartate | 1.00 | 1.23 | 1.07 | 1.23 | 1.03 | 1.07 | 1.33 | 1.37 | 1.13 | LK03 |
| Aminotransferase | 1.00 | 1.23 | 1.17 | 1.13 | 0.93 | 0.97 | 1.07 | 2.63 | 1.20 | KP1 |
| (Aspartate | | | | | | | | | | |
| Transaminase) | | | | | | | | | | |
| Gamma | 1.00 | 0.93 | 0.87 | 1.00 | 1.03 | 1.00 | 1.07 | 1.13 | 1.03 | LK03 |
| Glutamyltransferase | 1.00 | 0.93 | 0.90 | 1.07 | 1.03 | 1.10 | 1.07 | 1.10 | 1.10 | KP1 |

TABLE 73
Normalized Serum Chemistry Result for Individual Animals

| | Day | | | | | | | | | | |
|---|---|---|---|---|---|---|---|---|---|---|---|
| Analyte | NHP No. | −7 | 0 | 3 | 7 | 14 | 28 | 42 | 56 | 84 | AAV |
| Alanine | 5 | 21 | 29 | 26 | 50 | 50 | 38 | 51 | 44 | 47 | LK03 |
| Aminotransferase | 7 | 25 | 22 | 28 | 51 | 37 | 35 | 47 | 36 | 39 | |
| (Alanine | 1 | 16 | 18 | 24 | 56 | 50 | 39 | 39 | 39 | 40 | |
| Transaminase) | 3 | 71 | 79 | 30 | 90 | 83 | 104 | 105 | 137 | 142 | KP1 |
| | 6 | 44 | 44 | 67 | 175 | 151 | 60 | 66 | 72 | 58 | |
| | 9 | 7 | 17 | 17 | 26 | 25 | 25 | 25 | 36 | 34 | |
| | 5 | 40 | 46 | 48 | 50 | 46 | 45 | 61 | 61 | 50 | LK03 |
| | 7 | 44 | 51 | 42 | 56 | 44 | 46 | 70 | 58 | 47 | |
| Aspartate | 1 | 47 | 59 | 46 | 57 | 45 | 46 | 43 | 59 | 53 | |
| Aminotransferase | 3 | 48 | 42 | 40 | 45 | 39 | 45 | 43 | 85 | 41 | |
| (Aspartate | 6 | 42 | 47 | 56 | 56 | 47 | 41 | 49 | 98 | 44 | KP1 |
| Transaminase) | 9 | 39 | 68 | 55 | 49 | 33 | 37 | 47 | 154 | 67 | |
| Gamma | 5 | 45 | 52 | 44 | 53 | 55 | 51 | 55 | 61 | 55 | LK03 |
| Glutamyltransferase | 7 | 81 | 72 | 66 | 79 | 77 | 79 | 84 | 82 | 81 | |
| | 1 | 42 | 33 | 33 | 39 | 39 | 38 | 38 | 43 | 40 | |
| | 3 | 94 | 80 | 89 | 92 | 92 | 100 | 97 | 103 | 105 | KP1 |
| | 6 | 69 | 66 | 54 | 75 | 80 | 68 | 68 | 74 | 70 | LK03 |
| | 9 | 51 | 60 | 49 | 57 | 53 | 63 | 59 | 66 | 58 | |

[0785] 5. Hematology Parameters

[0786] For hematological analyses, approximately 0.5 mL whole blood was collected from each animal at each of 7 days prior to AAV infusion, the day of infusion (day 0), and at days 3, 7, 14, 28, 42, 56 and 84 post-infusion, as detailed above, and placed into tubes containing ethylene diamine tetra acetate (K2EDTA) as an anticoagulant. Hematology samples were maintained at room temperature or refrigerated at 2-8° C. until analysis. Samples were analyzed on a Roche/Hitachi Cobas Clinical Chemistry System (Roche Diagnostics, Indianapolis, Ind.) per laboratory SOP (Routine Operation of the Roche/Hitachi cobas c501 Chemistry Analyzer) in accord with manufacturer's instructions.

[0787] The hematological analysis results show that animals were similarly unaffected by administration of rAAV-LK03 and rAAV-KP1; hematological markers remained stable before and after AAV administration and were within normal ranges for all NHPs. The observed transient decreases in red blood cells and hematocrit accompanied by transient increases in reticulocytes at the early timepoints can be attributed to a compensatory response due to more frequent blood collection. Baseline levels of total white blood cells (WBC) overall were higher in animals assigned to Group 1 (LK03) than in animals assigned to Group 2 (KP1), but treatment had no apparent effect on individual animal WBC counts, as the absolute and the relative concentrations remained relatively stable throughout the duration of the study.

[0788] The hematology parameters assessed are set forth in Table 74; and the hematology results, expressed as an average of the three animals for each group, are set forth in Table 75, each below:

TABLE 74
Hematology Parameters

| Parameter | Abbreviation^{A} | Units |
|---|---|---|
| Red Blood Cell Count | RBC | 10⁶/μL |
| Hemoglobin | HGB | g/dL |
| Hematocrit | HCT | % |
| Mean Corpuscular Volume | MCV | fL |
| Mean Corpuscular Hemoglobin | MCHC | g/dL |
| Concentration | | |
| Mean Corpuscular Hemoglobin | MCH | pg |
| Platelet Count | PLT | 10³/μL |
| Absolute Reticulocyte | AbRETIC | K/μL |
| Percent Reticulocytes | RETIC | % RBC |

White Blood Cell Count and Absolute and Percentage Differential

| | | |
|---|---|---|
| White Blood Cell Count | WBC | 10³/μL (and %) |
| Neutrophils | PMN | 10³/μL (and %) |
| Lymphocytes | LYM | 10³/μL (and %) |
| Monocytes | MONO | 10³/μL (and %) |
| Eosinophils | EOS | 10³/μL (and %) |
| Basophils | BASO | 10³/μL (and %) |

TABLE 75
Hematology Results

| | Day | | | | | | | | | |
|---|---|---|---|---|---|---|---|---|---|---|
| Parameter | −7 | 0 | 3 | 7 | 14 | 28 | 42 | 56 | 84 | AAV |
| Red Blood Cell | 6.29 | 5.41 | 4.70 | 4.95 | 5.34 | 5.51 | 6.00 | 5.78 | 5.85 | LK03 |
| Count | | | | | | | | | | |
| | 6.09 | 5.77 | 5.80 | 5.62 | 5.60 | 5.98 | 5.96 | 6.08 | 6.30 | KP1 |
| Hemoglobin | 14.70 | 12.23 | 10.67 | 11.27 | 12.20 | 12.50 | 13.60 | 13.00 | 13.30 | LK03 |
| | 13.47 | 12.70 | 12.83 | 12.40 | 12.40 | 13.17 | 13.20 | 13.37 | 13.73 | KP1 |
| Hematocrit | 46.47 | 40.73 | 35.40 | 37.80 | 40.73 | 42.23 | 47.20 | 43.17 | 43.70 | LK03 |
| | 44.93 | 42.77 | 42.70 | 41.37 | 42.13 | 45.03 | 46.23 | 44.90 | 45.97 | KP1 |
| Mean | 74.00 | 75.33 | 75.67 | 76.33 | 76.33 | 77.00 | 78.67 | 75.00 | 74.67 | LK03 |
| Corpuscular | | | | | | | | | | |
| Volume | | | | | | | | | | |
| | 73.67 | 74.33 | 73.67 | 73.67 | 75.00 | 75.00 | 77.67 | 74.00 | 73.00 | KP1 |
| Mean | 23.37 | 22.60 | 22.80 | 22.73 | 22.83 | 22.70 | 22.70 | 22.50 | 22.70 | LK03 |
| Corpuscular | | | | | | | | | | |
| Hemoglobin | | | | | | | | | | |
| Concentration | | | | | | | | | | |
| | 22.03 | 22.07 | 22.07 | 22.03 | 22.13 | 22.00 | 22.13 | 21.97 | 21.77 | KP1 |
| Mean | 31.57 | 30.03 | 30.13 | 29.87 | 29.97 | 29.63 | 28.87 | 30.13 | 30.47 | LK03 |
| Corpuscular | | | | | | | | | | |
| Hemoglobin | | | | | | | | | | |
| | 29.90 | 29.67 | 29.97 | 29.90 | 29.40 | 29.20 | 28.53 | 29.73 | 29.83 | KP1 |
| Platelet Count | 214.00 | 345.67 | 217.67 | 290.33 | 379.33 | 383.00 | 335.67 | 365.33 | 384.00 | LK03 |
| | 297.67 | 182.00 | 259.00 | 328.00 | 365.00 | 336.33 | 315.67 | 351.33 | 263.67 | KP1 |
| Absolute | 47.00 | 52.33 | 50.67 | 62.33 | 73.33 | 51.67 | 40.00 | 52.00 | 37.33 | LK03 |
| Reticulocyte | | | | | | | | | | |
| | 45.00 | 50.00 | 42.00 | 50.67 | 67.00 | 44.33 | 39.67 | 32.33 | 44.33 | KP1 |
| Percent | 0.73 | 0.97 | 1.10 | 1.23 | 1.37 | 0.93 | 0.67 | 0.90 | 0.63 | LK03 |
| Reticulocytes | | | | | | | | | | |
| | 0.73 | 0.87 | 0.73 | 0.90 | 1.20 | 0.73 | 0.67 | 0.53 | 0.70 | KP1 |
| White Blood | 14.17 | 14.40 | 9.63 | 12.03 | 13.57 | 13.33 | 14.63 | 13.43 | 12.93 | LK03 |
| Cell Count | | | | | | | | | | |
| | 7.77 | 7.40 | 6.50 | 6.13 | 7.70 | 6.30 | 6.40 | 7.30 | 6.27 | KP1 |
| Neutrophils | 4962.67 | 6116.67 | 4441.33 | 3802.67 | 5261.00 | 5392.33 | 5861.33 | 4733.00 | 4345.33 | LK03 |
| | 3395.33 | 3912.67 | 3300.33 | 2292.33 | 3905.67 | 1452.27 | 2202.33 | 3717.33 | 1962.67 | KP1 |
| Lymphocytes | 8545.33 | 7587.33 | 4698.33 | 7475.33 | 7544.67 | 7241.00 | 8151.67 | 8064.33 | 7813.33 | LK03 |
| | 3835.33 | 3038.33 | 2674.33 | 3297.67 | 3304.33 | 2093.27 | 3820.00 | 3076.00 | 3846.67 | KP1 |
| Monocytes | 474.00 | 608.00 | 433.67 | 688.33 | 639.33 | 509.33 | 483.33 | 487.33 | 603.33 | LK03 |
| | 462.00 | 394.00 | 479.67 | 492.00 | 426.67 | 285.07 | 351.67 | 444.00 | 340.33 | KP1 |
| Eosinophils | 118.33 | 74.00 | 15.00 | 50.00 | 105.33 | 97.67 | 31.33 | 126.00 | 155.33 | LK03 |
| | 66.33 | 52.33 | 41.33 | 41.67 | 58.33 | 32.40 | 23.33 | 53.67 | 107.67 | KP1 |
| Basophils | 66.00 | 14.33 | 45.33 | 16.67 | 16.33 | 93.33 | 106.00 | 23.00 | 16.33 | LK03 |
| | 7.67 | 2.67 | 4.33 | 10.00 | 5.00 | 3.33 | 3.00 | 9.33 | 9.67 | KP1 |

[0789] 6. Coagulation Parameters

[0790] For assessing the coagulation parameters, set forth in Table 76, approximately 1.8 mL whole blood was collected from each animal at each of 7 days prior to AAV infusion, and at days 3, 7, 14, 28, 42, 56 and 84 post-infusion as detailed above and placed into tubes containing 3.2% sodium citrate as an anticoagulant. Samples were maintained at room temperature and centrifuged at 2500×g for 10 minutes at room temperature within one hour of collection. Plasma was separated and frozen at approximately −70° C. for batched analysis within six months of collection. Sample collection and processing was performed per the laboratory SOP for Collection and Processing of Samples for Clinical Pathology

[0791] Samples were analyzed for prothrombin time (PT) and activated partial thromboplastin time (aPTT) by automated mechanical clot formation analysis on an Amax Destiny Plus Coagulation Analyzer (Trinity Biotech, Jamestown, N.Y.) per manufacturers instructions on the Amax Destiny Plus Coagulation Analyzer (Trinity Biotech PLC, Bray, Co Wicklow, Ireland). The coagulation parameters that were assessed are shown in Table 76, below:

TABLE 76
Coagulation Parameters

| Parameter | Abbreviation^{A} | Units |
|---|---|---|
| Prothrombin time | PT | sec |
| Activated partial | aPTT | sec |
| thromboplastin time | | |

[0792] The results show that Prothrombin and Activated partial thromboplastin time are similar between LK03 and KP1 for all timepoints, and did not significantly change before and after AAV administration, demonstrating that PT and aPTT were unimpacted by AAV administration. Individual animal results also were assessed. The results do not indicate significant variation in PT or aPTT between and among individual animals.

[0793] The data are set forth as the mean of 2-3 samples in Table 77, and the individual animal data are set forth in Table 78, below:

TABLE 77
Coagulation Results

| | Day | | | | | | | | |
|---|---|---|---|---|---|---|---|---|---|
| Parameter | −7 | −3 | 7 | 14 | 28 | 42 | 56 | 84 | AAV |
| Prothrombin | 13.75 | nd | 13.55 | 12.3 | 13.37 | 14.1 | 12.93 | 12.73 | LK03 |
| time | 14.2 | 13.4 | 13.57 | 12.6 | 13.07 | 14.23 | 13.77 | 13.30 | KP1 |
| Activated partial | 25.15 | nd* | 27.25 | 25.43 | 25.73 | 24.57 | 25.67 | 25.93 | LK03 |
| thromboplastin | 24.85 | 20.3 | 23.63 | 23 | 24.87 | 28.33 | 28.63 | 24.60 | KP1 |
| time | | | | | | | | | |

*nd = not determined (Tables 77 and 78)

TABLE 78
Select Results for Individual Animals

| | Day | | | | | | | | | |
|---|---|---|---|---|---|---|---|---|---|---|
| Analyte | NHP No. | −7 | −3 | 7 | 14 | 28 | 42 | 56 | 84 | AAV |
| Prothrombin | 5 | 13.2 | nd* | nd | 12.3 | 13.4 | 13.3 | 12.2 | 12.9 | LK03 |
| time | 7 | nd | nd | 13.1 | 12.3 | 13.2 | 13.9 | 13.7 | 12.6 | |
| | 1 | 14.3 | nd | 14.0 | 12.4 | 13.5 | 12.0 | 12.9 | 12.7 | |
| | 3 | 15.8 | nd | 14.5 | 13.7 | 15.6 | 15.1 | 16.6 | 15.3 | KP1 |
| | 6 | 12.6 | nd | 12.5 | 11.4 | 12.4 | 11.6 | 12.3 | 12.4 | |
| | 9 | nd | 13.4 | 13.7 | 12.7 | 14.3 | 16.0 | 12.4 | 12.2 | |
| Activated | 5 | 20.5 | nd | nd | 25.6 | 25.0 | 24.7 | 21.8 | 21.6 | LK03 |
| partial | 7 | nd | nd | 23.7 | 21.1 | 23.0 | 23.4 | 23.2 | 22.0 | |
| thromboplastin | 1 | 29.8 | nd | 30.8 | 29.6 | 29.2 | 25.6 | 31.7 | 34.2 | |
| time | 3 | 24.0 | nd | 22.4 | 22.6 | 23.8 | 21.4 | 23.1 | 23.6 | KP1 |
| | 6 | 25.7 | nd | 28.2 | 25.3 | 29.9 | 39.1 | 26.6 | 28.2 | |
| | 9 | nd | 20.3 | 20.3 | 21.0 | 20.9 | 24.5 | 21.2 | 22.0 | |

[0794] 7. FIX Expression

[0795] For analysis of FIX expression after rAAV-FIX administration, blood was collected from the femoral, saphenous, or cephalic veins of sedated cynomolgus monkeys at 7 days prior to the AAV injections, on the day of AAV dosing (day 0), and 3, 7, 14, 28, 42, 56 and 84 days post-intravenous dosing. Plasma was prepared from blood collection for bioanalytical assays. Sodium citrate was added to blood collected to 0.4% of the final volume. Plasma was prepared by centrifugation at 10,000 RPM at 4° C. for ten minutes and treated blood samples were stored at −80° C. Blood and plasma samples were kept on ice throughout collection and processing.

[0796] FIX concentrations in plasma were determined using a FIX enzyme-linked immunosorbent antigen assay (ELISA), as detailed in Example 14, above. The assay employed coating of anti-human Factor IX antibody (AHIX-5041, Heamatologic Technologies, Essex Vt.) at 2 ug/ml on a 96 well assay plate to capture the FIX. FIX antigen was detected with human-specific detection antibodies to avoid cross-reactivity with endogenous monkey FIX. Detection of the captured FIX was performed with a goat anti-human FIX (GAFIX-HRP, Affinity Biologicals, Ontario Canada) polyclonal antibody at 2 μg/mL conjugated to HRP, which emits a colorimetric signal directly proportional to the quantity of FIX. The colorimetric signal was measured on a Spectra MAX UV/VIS with SOFTmax PRO (Molecular Devices, San Jose, Calif.) and the unknown FIX concentrations in plasma were interpolated from a standard curve ranging from 0.4 ng/mL to 800 ng/mL of FIX.

[0797] FIX expression was calculated as an average of each animal at each time point analyzed in triplicate. Data are provided in Tables 79 and 80, below. Table 79 depicts rAAV-FIX expression relative to normal FIX expression in human. The results in Table 80 are displayed as FIX protein expression in ng protein/mL serum, without background subtracted out.

[0798] The results show that infusion of rAAV KP1-FIX and LK03-FIX achieved high initial FIX levels at 3 days and 1 week post infusion, which decreased to a steady plateau over the course of six weeks. The results show that no significant differences in plasma FIX levels were observed between animals administered rAAV-LK03-FIX and rAAV-KP1-FIX, demonstrating in vivo effectiveness of the AAV vectors for expression of FIX as provided herein.

TABLE 79
Modified FIX Protein Expression (% of normal human)
after infusion with LK03-FIX or KP1-FIX

NHP Animal Identification Number

| Day | 1 | 5 | 7 | 3 | 6 | 9 |
|---|---|---|---|---|---|---|
| −7 | 0 | 0 | 0 | 0 | 0 | 0 |
| 0 | 0 | 0 | 0 | 0 | 0 | 0 |
| 3 | 5.6 | 1.36 | 3.88 | 3.98 | 0.266 | 5.98 |
| 7 | 3.12 | 1.562 | 3.82 | 2.36 | 0.39 | 3.04 |
| 14 | 2.24 | 1.642 | 2.58 | 1.956 | 0.656 | 2.66 |
| 28 | 2.62 | 1.244 | 2.18 | 1.396 | 0.376 | 0.384 |
| 42 | 2.54 | 0.610 | 1.562 | 1.188 | 0.342 | BLQ |

*NHPs 1, 5, 7 were administered LK03-FIX; NHPs 3, 6, 9 were administered KP1-FIX BLQ = below quantitation limit of the assay

TABLE 80
Modified FIX Protein Expression (ng/mL)
after infusion with LK03-FIX or KP1-FIX

NHP Animal Identification Number

| Day | 1 | 5 | 7 | 3 | 6 | 9 |
|---|---|---|---|---|---|---|
| −7 | 0 | 0 | 0 | 0 | 0 | 0 |
| 0 | 0 | 0 | 0 | 0 | 0 | 0 |
| 3 | 280 | 68 | 194 | 199 | 13.3 | 299 |
| 7 | 156 | 78.1 | 191 | 118 | 19.5 | 152 |
| 14 | 112 | 82.1 | 129 | 97.8 | 32.8 | 133 |
| 28 | 131 | 62.2 | 109 | 69.8 | 18.8 | 19.2 |
| 42 | 127 | 30.5 | 78.1 | 59.4 | 17.1 | BLQ |
| 56 | 266 | 0 | 100 | 42.9 | 16.8 | BLQ |
| 84 | 0 | 10.2 | 87.5 | 0 | 16.5 | BLQ |

*NHPs 1, 5, 7 were administered LK03-FIX; NHPs 3, 6, 9 were administered KP1-FIX
BLQ = below quantitation limit of the assay

[0799] 8. FIX Activity

[0800] For analysis of FIX activity after rAAV-FIX administration, blood was collected from the femoral, saphenous, or cephalic veins of sedated cynomolgus monkeys at 7 days prior to the AAV injections, and 3, 7, 14, 28, 42, 56 and 84 days post-intravenous dosing, and prepared as plasma for assessment of functional coagulation activity of modified FIX.

[0801] FIX activity was assessed using the activated partial thromboplastin time (aPTT)-based factor IX single-stage clotting assay primarily as detailed above, in Example 14. Briefly, the aPTT-based factor IX single-stage clotting assay was performed on an ACL-TOP instrument (Instrumentation Laboratories (Bedford, Mass.)) using standard reagents purchased from the manufacturer. Briefly, the aPTT reagents (HemosIL or SynthasIL) was equilibrated at 37° C. and preincubated with NHP plasma dilutions in accord with manufacturer's instructions. Clotting was induced through the automated addition of 20 mM calcium chloride to trigger the coagulation process. The clot was detected by measuring the change in optical density and the amount of time required for the plasma specimen to clot was recorded. Calibration was performed with the HemosIL Cal Plasma (Instrumentation Laboratories, Bedford, Mass.) as a reference traceable to the WHO standard (09/172). Each sample was run in true duplicate and using the required number of dilutions to obtain valid and reportable results. Sample dilutions generally ranged from 1:10 to 1:300 depending on the anticipated FIX expression levels.

[0802] Data are provided in Tables 81 and 82, below. FIX activity was calculated as an average of each animal at each time point analyzed in technical triplicate. Table 81 depicts relative rAAV-FIX percent activity changes compared to baseline hFIX activity in each individual animal with background (pre-treatment) FIX levels subtracted out. The results in Table 82 are displayed as FIX activity in IU/mL serum, without background (pre-treatment) FIX levels subtracted out.

[0803] The results show that FIX activity, as determined by the activated partial thromboplastin time (aPTT)-assay, was increased after administration of rAAV-LK03-FIX and rAAV-KP1-FIX. Infusion of rAAV KP1-FIX and LK03-FIX achieved high initial FIX activity directly after administration, and at 3 days up to two weeks post infusion. Thereafter, activity decreased to a steady plateau over the course of six weeks. The results show no significant differences in plasma FIX activity between animals administered rAAV-LK03-FIX and rAAV-KP1-FIX. In this model, modified FIX administered intravenously when packaged with the capsid of SEQ ID NO: 418 (KP1) and the LK03 capsid showed increased activity compared to baseline levels.

TABLE 81
Modified FIX Activity after infusion
(%) with LK03-FIX and KP1-FIX

NHP Animal Identification Number

| Day | 1 | 5 | 7 | 3 | 6 | 9 |
|---|---|---|---|---|---|---|
| −7 | 0 | 1.5 | 5.1 | 0 | 0 | 3.2 |
| 3 | 118.3 | 36.9 | 84 | 90.1 | 13.7 | 149 |
| 7 | 51.8 | 36.4 | 87.5 | 46.8 | 7.6 | 65.9 |
| 14 | 37.6 | 29.6 | 43.6 | 24.7 | 0.2 | 48.5 |
| 28 | 44.9 | 17.3 | 37.5 | 16.1 | 0.2 | 3.3 |
| 42 | 43.7 | 0.2 | 24.1 | 11.2 | 0 | 0 |

*NHPs 1, 5, 7 were administered LK03-FIX; NHPs 3, 6, 9 were administered KP1-FIX

TABLE 82
Modified FIX Activity (IU/mL) after
infusion with LK03-FIX and KP1-FIX

| | NHP Animal Identification Number | | | | | |
|---|---|---|---|---|---|---|
| Day | 1 | 5 | 7 | 3 | 6 | 9 |
| −7 | 0.2875 | 0.3675 | 0.404 | 0.3305 | 0.3425 | 0.385 |
| 3 | 1.536 | 0.722 | 1.193 | 1.254 | 0.4895 | 1.843 |
| 7 | 0.8705 | 0.717 | 1.2275 | 0.821 | 0.429 | 1.0115 |
| 14 | 0.7285 | 0.6485 | 0.789 | 0.5995 | 0.3545 | 0.8375 |
| 28 | 0.802 | 0.5255 | 0.728 | 0.514 | 0.3545 | 0.3855 |
| 42 | 0.7895 | 0.3545 | 0.5935 | 0.465 | 0.312 | 0.22 |
| 56 | 1.7305 | 0.3060 | 0.7515 | 0.4220 | 0.3790 | 0.2480 |
| 84 | 0.1770 | 0.2300 | 0.7215 | 0.2320 | 0.3485 | 0.2565 |

*NHPs 1, 5, 7 were administered LK03-FIX; NHPs 3, 6, 9 were administered KP1-FIX

[0804] 9. FIX Specific Activity

[0805] The specific activity of modified FIX in animals intravenously infused with AAV-FIX (LK03 and KP1) was determined by the assessment of antigen levels and protein coagulation activity. The FIX-specific activity was calculated by dividing the clotting activity (IU/mL) by the antigen levels (ng/mL) and expressing the results in units per nanogram (IU/ng).

[0806] The results show that the specific activity of modified FIX was initially highest for modified FIX for all animals of both rAAVs administered. Thus, KP1, which was selected for and demonstrated high expression in human liver cells, demonstrates at least similar specific activity as the highly active rAAV-LK03, which was previously shown to efficiently transduce NHP cells (Wang et al., Mol. Ther. (2015) 23(12):1877-1887). Wang et al. notes that although rAAV-LK03 efficiently transduces NHP cells, the transduction efficiency was less dramatic than the transduction efficiency of human cells, for which they were selected as transducing better than previously characterized chimeric capsids. Similar results, thus, should be observed for rAAV-KP1, which was also selected for in human hepatocytes. The FIX specific activity results are set forth in Table 83, below:

TABLE 83
Specific Activity (IU/ng) of modified FIX
after infusion with LK03-FIX or KP1-FIX

| | NHP Animal Identification Number | | | | | |
|---|---|---|---|---|---|---|
| Day | 1 | 5 | 7 | 3 | 6 | 9 |
| 3 | 0.00446 | 0.00521 | 0.00407 | 0.00464 | 0.01105 | 0.004876 |
| 7 | 0.00374 | 0.00448 | 0.00431 | 0.00416 | 0.00444 | 0.004122 |
| 14 | 0.00394 | 0.00342 | 0.00298 | 0.00275 | 0.00037 | 0.003402 |
| 28 | 0.00393 | 0.00254 | 0.00297 | 0.00263 | 0.00064 | 0.000026 |
| 42 | 0.00395 | BLQ | 0.00243 | 0.00226 | BLQ | BLQ |
| 56 | 0.00543 | BLQ | 0.00348 | 0.00213 | 0.00217 | BLQ |
| 84 | BLQ | BLQ | 0.00363 | BLQ | 0.00036 | BLQ |

*NHPs 1, 5, 7 were administered LK03-FIX; NHPs 3, 6, 9 were administered KP1-FIX
BLQ = below quantitation limit of the assay

[0807] 10. Conclusions

[0808] rAAV-KP1 was generated and selected for high expression in human liver cells. These results are replicated in NHPs, where, upon intravenous administration of rAAV-KP1-FIX, NHPs exhibited high initial FIX expression and activity. Expression of the modified FIX (R318Y/R338E/T343 replacements) described herein, which has high potency, was similar between the KP1 capsid described herein and the rAAV-LK03, which was shown to effectively transduce human hepatocytes, and to a lesser extent NHPs. It can be inferred from this evidence that the KP1 capsid and rAVV expression vector containing the KP1 capsid and encoding a modified FIX, with an exon as described herein, will be expressed in humans and provide high potency FIX in vivo.

[0809] Animal Welfare

[0810] Only visually healthy animals were enrolled in the study. This study complied with all applicable sections of The Animal Welfare Act Regulations (9 CFR Parts 1, 2, 3) and the Guide for the Care and Use of Laboratory Animals, Eight Edition National Research Council, National Academy Press Washington, D.C. Copyright 2011. All assessments took place in an animal research facility this is fully accredited by the Association for Assessment and Accreditation of Laboratory Animal Care (AAALAC).

### Example 19

### FIX mRNA Detection in Cynomolgus Monkey Liver after Injection of the rAAV-KP1 Vector with the Capsid KP1, and the Vector Designed rAAV-LK03, Each Encoding Modified FIX (R318Y/R338E/T343R)

[0811] RNA detection experiments were performed to determine the number of RNA molecules in liver sections from cynomolgus monkeys injected with 1.0e12 vg/kg of AAV-modified FIX (SEQ ID NO:486, or SEQ ID NO:394 with the replacement T148A). Liver samples were assayed for detection of human FIX transgene (codon optimized human FIX).

[0812] Animals were euthanized and liver samples were collected for RNA analyses for detection of the human FIX codon optimized transgene. Briefly, Formalin-Fixed Paraffin-Embedded (FFPE) samples from the left, right, caudate, and quadrate liver lobes were sectioned at 5 μm thickness and mounted onto SuperFrost Plus slides (Fisher Scientific; 12-550-15) in a water bath. Six samples were collected from each animal, and 12 replicate slides with 4 sections per slide were prepared for each animal.

[0813] RNAscope® in situ hybridization was performed on liver sections and analyzed using the RNAscope® 2.5 LSx Red Reagent Kit-RED (Advanced Cell Diagnostics, Inc.; Cat. No. 322750), generally in accord with manufacturer's instructions. This method hybridizes gene-specific probe pairs to target mRNA (here, codon optimized, modified hFIX (R318Y/R338E/T343R)). The signal then was amplified in a series of steps, hybridized to a final alkaline phosphatase labeled probe, and detected using Fast Red. Each RNA transcript of interest was discerned as an individual chromogen dot under brightfield microscopy. Scanned images were visually scored for transcript levels based on number of dots per cell.

[0814] Preliminary experiments were conducted to optimize pretreatment conditions and to identify conditions to maximize signal-to-noise ratio. Samples were assessed as per the kit instructions (Advanced Cell Diagnostics, Inc.; Cat. No. 322750) with the following differences: epitope retrieval 2 (LSER2) was extended to 20 minutes at 95° C., and the Protease III step was extended to 20 minutes at 40° C. The positive control probe target was Macaca fascicularis ubiquitin C (UBC) transcript variant X1 (Mfa-UBC) (Advanced Cell Diagnostics, Inc.; Cat. No. 461338). The negative control probe target was B. subtilis gene dihydrodipicolinate reductase (dapB) (Advanced Cell Diagnostics, Inc.; Cat. No. 312038), which is not present in cynomolgus monkey liver samples.

[0815] Samples were scored visually by a qualified scientist who assigned a single score to a sample based on the predominant staining pattern throughout the entire sample. Heterogeneity or non-uniformity of RNA staining was noted, if applicable. Samples were assessed for the number of foci per cell, ignoring the intensity of the staining, which does not correspond to the RNA quantification. Foci correlate to the number of individual RNA molecules, whereas dot intensity reflects the number of probe pairs bound to each molecule. Categories were established as set forth in Table 84, below:

TABLE 84
Scoring Criteria

| Score | Criteria |
|---|---|
| 0 | No staining or <1 dot/10 cells |
| 1 | 1-3 dots/cell |
| 2 | 4-9 dots/cell, with no or very few dot clusters |
| 3 | 10-15 dots/cell and/or <10% dots are in clusters |
| 4 | >15 dots/cell and/or >10% dots are in clusters |

[0816] Samples also were scored for the percentage of cells with target transcripts; categories were established as follows: 0%, 1-25%, 26-50%, 51-75%, 76-99%, or 100% positive cells. Samples also were assessed visually for the percent of positive cells that exhibited more than one foci per cell; categories were established as follows: <1%, 1-25%, 26-50%, or >50% cells with more than one foci per cell.

[0817] Higher staining of the Mfa-UBC positive control was noted around the edges of the tissue relative to the center. To mitigate this heterogeneity in staining, which is likely due to improper tissue fixation, pretreatment conditions were extended, which resulted in all samples passing internal quality control, where moderate to high UBC positive control staining was obtained throughout the sample, with little to no dapB staining (negative control).

[0818] As an additional control, the RNAscope® 2.5 LSx Red Assay was performed in pelleted liver cells. The results show that FIX was detected at high levels in a subset of liver cells in samples from NHP animal numbers 6 (KP1) and 7 (LK03). Cells from animals 1, 3, 5, and 9 had negligible to low detection of the transgene. The RNA expression results from pelleted liver cells correspond to the results from the fixed liver samples, detailed below.

[0819] The results for immunohistological staining are set forth in Table 85, below. The positive and negative controls gave expected results; the positive control staining was a score between 3 and 4 for almost all samples, demonstrating the high quality of the preparation and protocol, and the negative control (dapB score) was 0 for all samples, indicating a lack of non-specific staining. The results show that NHP animal numbers 6 and 7 were scored as 4 in each of the samples tested, exhibiting >15 dots per cell and/or >10% of dots in clusters, which indicates high RNA expression in a subset of cells. Animal number 6 was transduced with the KP1-FIX AAV vector, and animal number 7 was transduced with the LK03-FIX AAV vector. Thus, one animal for each vector was effectively transduced and exhibited high FIX RNA expression in liver. The other NHP animals (numbers 1, 5, 3 and 9) showed little to no FIX mRNA, and were all scored as a “1.” These results correlate with the FIX antigen levels at the end of study (see e.g., Table 80 day 84). Duplicate slides were assessed for each condition, and the results were the same for both slides of the corresponding condition. The results set forth in Table 85, below, represent the results for both slides.

TABLE 85
mRNA molecules in liver cells in animals
transduced with FIX AAV vectors

| | NPH | | | FIX | |
|---|---|---|---|---|---|
| Vector | animal | Core | Positive Control | Score | % FIX positive cells |
| LK03 | 1 | 1 | 4 | 1 | 1-25% |
| | | 2 | 4 | 1 | 1-25% |
| | | 3 | 4 | 1 | 1-25% |
| | | 4 | 4 | 1 | <1% |
| | 5 | 1 | 3-4* | 1 | 1-25% |
| | | 2 | 3-4 | 1 | <1% |
| | | 3 | 3-4 | 1 | <1% |
| | | 4 | 2 | 1 | <1% |
| | 7 | 1 | 4 | 4 | 1-25% |
| | | 2 | 3-4* | 4* | 1-25% |
| | | 3 | 3-4* | 4* | 1-25% |
| | | 4 | 3-4* | 4 | 1-25% |
| KP1 | 3 | 1 | 3-4 | 1 | 1-25% |
| | | 2 | 2* | 1* | 1-25% |
| | | 3 | 4 | 1* | <1% |
| | | 4 | 2 | 1* | 1-25% |
| | 6 | 1 | 4* | 4 | <1% |
| | | 2 | 4* | 4 | <1% |
| | | 3 | 4* | 4 | <1% |
| | | 4 | 4* | 4 | <1% |
| | 9 | 1 | 4 | 1 | 1-25% |
| | | 2 | 3-4* | 1 | 1-25% |
| | | 3 | 4* | 1* | 1-25% |
| | | 4 | 4 | 1 | 1-25% |

*Staining along the edges was higher than the center of the tissue

The results show LK03-AAV NHP numbers 1 and 5 and KP1 NHP number 3 showed high ECL values and were presumed positive. The positive results were confirmed for these animals. NHP animal numbers 6 (KP1) and 7 (LK03) were negative at all timepoints. Data are set forth in tables 86 and 87, below:

TABLE 86
LK03

| | NHP Animal Identification Number | | | | | | | | | | | |
|---|---|---|---|---|---|---|---|---|---|---|---|---|
| | 1 | | | | 5 | | | | 7 | | | |
| | | | | Conf. | | | | Conf. | | | | Conf. |
| Day | ECL | Result | Conf. | Result | ECL | Result | Conf. | Result | ECL | Result | Conf. | Result |
| −7 | 76 | Negative | NA | NA | 72 | Negative | NA | NA | 76 | Negative | NA | NA |
| 0 | 78 | Negative | NA | NA | 68 | Negative | NA | NA | 68 | Negative | NA | NA |
| 3 | 75 | Negative | NA | NA | 73 | Negative | NA | NA | 74 | Negative | NA | NA |
| 7 | 78 | Negative | NA | NA | 74 | Negative | NA | NA | 72 | Negative | NA | NA |
| 14 | 92 | Pres. | 6.99 | Negative | 77 | Negative | NA | NA | 73 | Negative | NA | NA |
| | | Positive | | | | | | | | | | |
| 28 | 89 | Pres. | −0.64 | Negative | 100 | Pres. | 32.41 | Positive | 73 | Negative | NA | NA |
| | | Positive | | | | Positive | | | | | | |
| 42 | 97 | Pres. | 16.37 | Positive | 1722 | Pres. | 96.87 | Positive | 82 | Negative | NA | NA |
| | | Positive | | | | Positive | | | | | | |
| 56 | 146 | Pres. | 61.21 | Positive | 8550 | Pres. | 99.29 | Positive | 78 | Negative | NA | NA |
| | | Positive | | | | Positive | | | | | | |
| 84 | 7871 | Pres. | 99.20 | Positive | 18061 | Pres. | 99.57 | Positive | 100 | Pres. | 3.62 | Neg |
| | | Positive | | | | Positive | | | | Positive | | |
| 98 | 16199 | Pres. | 99.60 | Positive | 15195 | Pres. | 99.56 | Positive | 92 | Pres. | 3.11 | Neg |
| | | Positive | | | | Positive | | | | Positive | | |

TABLE 87
KP1

| | NHP Animal Identification Number | | | | | | | | | | | |
|---|---|---|---|---|---|---|---|---|---|---|---|---|
| | 3 | | | | 6 | | | | 9 | | | |
| Day | ECL | Result | Conf. | ECL | Result | Conf. | ECL | Result | Conf. | ECL | Result | Conf. |
| −7 | 62 | Negative | NA | NA | 68 | Negative | NA | NA | 71 | Negative | NA | NA |
| 0 | 61 | Negative | NA | NA | 68 | Negative | NA | NA | 70 | Negative | NA | NA |
| 3 | 61 | Negative | NA | NA | 71 | Negative | NA | NA | 70 | Negative | NA | NA |
| 7 | 71 | Negative | NA | NA | 68 | Negative | NA | NA | 69 | Negative | NA | NA |
| 14 | 74 | Negative | NA | NA | 76 | Negative | NA | NA | 81 | Negative | NA | NA |
| 28 | 74 | Negative | NA | NA | 64 | Negative | NA | NA | 2254 | Negative | NA | Positive |
| 42 | 74 | Negative | NA | NA | 67 | Negative | NA | NA | 15306 | Pres. | 96.82 | Positive |
| | | | | | | | | | | Positive | | |
| 56 | 87 | Pres. | 18.75 | Positive | 62 | Negative | NA | NA | 21593 | Pres. | 99.42 | Positive |
| | | Positive | | | | | | | | Positive | | |
| 84 | 1796 | Pres. | 96.78 | Positive | 74 | Negative | NA | NA | 9876 | Pres. | 99.59 | Positive |
| | | Positive | | | | | | | | Positive | | |
| 98 | 8546 | Pres. | 99.27 | Positive | 78 | Negative | NA | NA | 71 | Pres. | 99.14 | NA |
| | | Positive | | | | | | | | Positive | | |

Pres. Positive = Presumptive Positive

### Example 20

### Vector Copy Numbers and FIX Transcripts in NHP Liver after Injection of a Recombinant Adeno-Associated Viral Vectors (rAAV), Provided Herein, Designated rAAV-LK03 and rAAV-KP1 Each Encoding Modified FIX (R318Y/R338E/T343R)

[0820] In vivo transduction efficiency of rAAV packaged with the capsid designated KP1 (SEQ ID NO:418) or LK03 ((Lisowski et al., (2014) Nature 506(7488):382-86), and expressing modified FIX (R318Y/R338E/T343R), was examined in non-human primate (NHP) animals 1, 3, 5, 6, 7 and 9, described in the Example above. huFIX transcript levels and rAAV vector geneome copy numbers were quantified in the livers of NHPs injected with the rAAV FIX vector packaged with the capsid KP1 or LK03 after sacrifice at Day 98 post rAAV injection.

[0821] The animals were sacrificed, livers were harvested, and the livers were prepared for analysis of vector copy number by qPCR, at two test sites, using different protocols. Both sites used the plasmid encoding modified FIX (R318Y/R338E/T343R) codon optimized for mouse to generate a standard curve of known FIX concentrations. The primers whose sequences are set forth in SEQ ID NOS: 567 and 568 were used as forward and reverse amplification primers, respectively.

[0822] At test site 1, the following protocol was followed. Total genomic DNA was isolated from 25 mg frozen liver samples from the left, right, caudate, and quadrate liver lobes using the MagMAX™-96 DNA Multi-Sample kit (Invitrogen; Cat. No. 4413021), per the manufacturer's instructions. An 8-point standard curve was prepared from circularized double stranded plasmid DNA with a known final copy number concentration from 5×10⁷ vg/μL-5 vg/μL. qPCR reactions were prepared with 300 nM each of FIX forward and reverse primers, 100 nM FIX probe, and 1× final concentration to TaqMan Fast Advanced Master Mix (Applied Biosystems; Cat. No. 4444557), and reactions were run per the cycle durations indicated in Table 88. Starting vector copy number was back calculated against the regression equation generated by the calibration curve and expressed in FIX copies/μg DNA.

TABLE 88
PCR Conditions

| | UNG | Initial | qPCR | |
|---|---|---|---|---|
| | Incubation | Denaturation | (40 cycles) | |
| Parameter | Hold | Hold | Denature | Anneal/Extend |
| Temperature | 50 | 95 | 95 | 60 |
| (° C.) | | | | |
| Time (mm:ss) | 2:00 | 2:00 | 0:03 | 0:30 |

[0823] At test site 2, the following protocol was followed. Total genomic DNA was isolated from 25 mg frozen liver samples from the left, right, caudate, and quadrate liver lobes. An 8-point standard curve was prepared from linearized double stranded FIX plasmid DNA with a known final copy number concentration from 10⁸ copies/μL-10 copies/μL. Similarly, 8-point standard curves also were generated from solutions of known albumin or hemoglobin gene copy number concentrations of 10⁸ copies/μL-10 copies/μL. Samples were run in triplicate for duplex qPCR reactions with either FIX/albumin standard curves and probes, or FIX/hemoglobin standard curves and probes. Resultant quantitation cycle (Cq) values for each product were back calculated against the regression equation generated by the calibration curve for its corresponding standard. Starting FIX vector copy numbers were then expressed as a ratio of FIX copies/albumin copies, FIX copies/hemoglobin copies, or FIX copies/μg DNA.

[0824] The results for vector copies/g of total genomic DNA (gDNA) for sites 1 and 2 showed similar trends, with differences in the raw values of total copy number per total amount of gDNA. The data from site 1 are set forth in Tables 89-96, below. The results show that vector copy numbers were similar between animals, with the exception of KP1 transduced NHP animal number 6, which showed decreased vector copy numbers, and KP1 transduced NHP animal number 9 and LK03 transduced NHP animal number 7, which both showed increased vector copy numbers compared to the other animals. The data for vector copy number/μg gDNA, for site 1, is set forth in Table 89, below. Similar trends were shown when the vector copy number was compared to albumin or hemoglobin gene copy numbers. These results are set forth in Tables 90 and 91 as mean vector copies per cell normalized to albumin copies or actin copies.

[0825] FIX transcript levels also were assessed relative to actin and albumin transcripts. A two-step RT-PCR method was performed. First, total RNA was isolated from frozen liver samples of the left, right, caudate, and quadrate liver lobes. Trace amounts of genomic DNA was removed. The resulting purified RNA was then reverse transcribed to cDNA as described below and run per the cycle durations indicated.

[0826] The cDNA template was then used in duplex qPCR reactions with either factor 9/albumin standard curves and probes or factor 9/actin standard curves and probes. In this way, resultant quantitation cycle (Cq) values for each product could be back calculated against the regression equation generated by the calibration curve for its corresponding standard. Starting factor 9 transcript numbers were then expressed as a ratio of factor 9 transcripts/albumin transcripts or factor 9 transcripts/actin transcripts.

[0827] The results are set forth as a percentage of actin (Table 93) and albumin (Table 92). The results show huFIX transcript levels were highest in NHP 7 (AAV-LK03). NHP 6 also showed increased FIX transcript levels relative to actin and albumin, compared to the other animals. The results are set forth in Tables 89-93, below:

TABLE 89
Vector Copy Number/μg gDNA (×10⁵)

| | LK03 | | | KP1 | | |
|---|---|---|---|---|---|---|
| | 1 | 5 | 7 | 3 | 6 | 9 |
| Left | 1.43 | 1.77 | 10.50 | 4.77 | 0.285 | 9.44 |
| Right | 3.80 | 2.35 | 9.80 | 4.09 | 0.658 | 12.40 |
| Caudate | 2.40 | 3.45 | 7.74 | 6.07 | 0.5380 | 10.90 |
| Quadrate | 4.77 | 2.60 | 7.69 | 2.67 | 0.478 | 11.60 |
| Average* | 3.10 | 2.54 | 8.94 | 4.40 | 0.49 | 11.10 |

*Average of all lobes

TABLE 90
Vector copy number/albumin gene copies

| | |
|---|---|
| LK03 | KP1 |

| | 1 | 5 | 7 | 3 | 6 | 9 |
|---|---|---|---|---|---|---|
| Left | 1.25 | 1.44 | 8.07 | 3.5 | 0.26 | 6.61 |
| Right | 3.03 | 1.72 | 7.19 | 3.17 | 0.61 | 8.83 |
| Caudate | 1.69 | 2.65 | 6.37 | 4.27 | 0.34 | 8.29 |
| Quadrate | 2.87 | 2.13 | 6.87 | 1.97 | 0.35 | 7.90 |
| Total | 2.21 | 1.98 | 7.13 | 3.23 | 0.40 | 7.91 |

TABLE 91
Vector copy number/hemoglobin gene copies

| | |
|---|---|
| LK03 | KP1 |

| | 1 | 5 | 7 | 3 | 6 | 9 |
|---|---|---|---|---|---|---|
| Left | 0.94 | 1.17 | 4.85 | 2.50 | 0.2 | 4.85 |
| Right | 1.84 | 1.41 | 6.03 | 2.55 | 0.39 | 5.87 |
| Caudate | 1.32 | 1.77 | 5.10 | 2.96 | 0.25 | 6.04 |
| Quadrate | 2.32 | 1.32 | 5.36 | 1.45 | 0.24 | 5.11 |
| Total | 1.60 | 1.42 | 5.33 | 2.37 | 0.27 | 5.46 |

TABLE 92
FIX transcripts Relative to Albumin Transcripts (×10⁻⁴)

| | LK03 | | | KP1 | | |
|---|---|---|---|---|---|---|
| | 1 | 5 | 7 | 3 | 6 | 9 |
| Left | 2 | 3.0 | 69.6 | 2.5 | 13.6 | 3.3 |
| Right | 6.5 | 2.4 | 69.3 | 2.1 | 18.1 | 5.4 |
| Caudate | 2.1 | 2.6 | 57.4 | 2.3 | 21.4 | 5.0 |
| Quadrate | 2.7 | 3.2 | 64.0 | 1.8 | 19.5 | 4.5 |
| Total | 3.3 | 2.8 | 65.1 | 2.2 | 18.2 | 4.5 |

TABLE 93
FIX transcripts Relative to Actin Transcripts (×10⁻²)

| | LK03 | | | KP1 | | |
|---|---|---|---|---|---|---|
| | 1 | 5 | 7 | 3 | 6 | 9 |
| Left | 10.2 | 22.7 | 232 | 12.9 | 18.2 | 3.3 |
| Right | 5.9 | 11.7 | 226 | 4.6 | 12.5 | 4.5 |
| Caudate | 4.7 | 22.9 | 198 | 10.4 | 15.9 | 4.2 |
| Quadrate | 6.7 | 12.0 | 165 | 6.4 | 20.1 | 4.7 |
| Total | 6.88 | 17.337 | 205 | 8.59 | 16.65 | 4.16 |

[0828] Next, FIX transcripts normalized to albumin or actin transcripts (% of albumin and % of actin, respectively) as a proportion of the number of vector copies, was calculated. This calculation estimates transcriptional efficiency, as it compares FIX transcripts to the total number of copies available within the tissue. The results follow similar trends to the results set forth above; huFIX transcript levels were highest in NHP 7 (AAV-LK03) and NHP 6 (AAV-KP1) also showed increased FIX transcript levels as a proportion of the number of vector copies. The results are set forth in Tables 94 and 95, below:

TABLE 94
FIX transcripts (% of Albumin)/Vector copies

| | LK03 | | | KP1 | | |
|---|---|---|---|---|---|---|
| | 1 | 5 | 7 | 3 | 6 | 9 |
| Left | 1.41E−09 | 1.71E−09 | 6.61E−09 | 5.27E−10 | 4.78E−08 | 3.46E−10 |
| Right | 1.71E−09 | 1.02E−09 | 7.07E−09 | 5.13E−10 | 2.75E−08 | 4.34E−10 |
| Caudate | 8.75E−10 | 7.44E−10 | 7.41E−09 | 3.79E−10 | 3.98E−08 | 4.55E−10 |
| Quadrate | 5.75E−10 | 1.22E−09 | 8.32E−09 | 6.66E−10 | 4.08E−08 | 3.91E−10 |
| Average | 1.14E−09 | 1.17E−09 | 7.35E−09 | 5.21E−10 | 3.9E−08 | 4.07E−10 |

TABLE 95
FIX transcripts (% of Actin)/Vector copies

| | LK03 | | | KP1 | | |
|---|---|---|---|---|---|---|
| | 1 | 5 | 7 | 3 | 6 | 9 |
| Left | 7.12E−07 | 1.28E−06 | 2.2E−06 | 2.71E−07 | 6.37E−06 | 3.5E−08 |
| Right | 1.56E−07 | 4.99E−07 | 2.29E−06 | 1.12E−07 | 1.89E−06 | 3.58E−08 |
| Caudate | 1.95E−07 | 6.62E−07 | 2.56E−06 | 1.71E−07 | 2.95E−06 | 3.82E−08 |
| Quadrate | 1.4E−07 | 4.64E−07 | 2.14E−06 | 2.41E−07 | 4.2E−06 | 4.08E−08 |
| Average | 3.01E−07 | 7.27E−07 | 2.3E−06 | 1.99E−07 | 3.85E−06 | 3.74E−08 |

[0829] Next, the proportion of FIX transcripts as a percentage of albumin compared to the number of vector copies per albumin copies, was calculated. The fact that these findings recapitulate those in tables 94 and 95 (relative trends compared among samples) evidences that the albumin gene copy number was consistent between total genomic DNA samples tested, as a set amount of gDNA should have the same number of albumin or globulin copies (2 per cell). The results tend to show that animals transduced with KP1-FIX had higher levels of FIX transcripts in liver as a proportion of vector and albumin copies. Animal #7, which was transduced with LK03-FIX also showed high levels.

TABLE 96
FIX transcripts (% albumin)/VC/albumin copies

| | LK03 | | | KP1 | | |
|---|---|---|---|---|---|---|
| | 1 | 5 | 7 | 3 | 6 | 9 |
| Left | 1.52E−07 | 1.85E−07 | 6.36E−07 | 5.01E−08 | 5.08E−06 | 3.65E−08 |
| Right | 1.57E−07 | 1.14E−07 | 7.7E−07 | 5.64E−08 | 2.6E−06 | 4.11E−08 |
| Caudate | 9.59E−08 | 6.96E−08 | 8.04E−07 | 3.58E−08 | 3.65E−06 | 4.9E−08 |
| Quadrate | 5.36E−08 | 1.15E−07 | 8.96E−07 | 6.2E−08 | 3.94E−06 | 3.59E−08 |
| Total | 1.15E−07 | 1.21E−07 | 7.76E−07 | 5.11E−08 | 3.82E−06 | 4.06E−08 |

[0830] The results show that rAAV vector copy numbers and FIX transcript levels varied among animals and high levels were observed with KP1 and with LK03. When FIX transcripts were calculated relative to albumin, taking into account the number of vector copies, KP1-transfected animals had a higher average of hFIX transcripts than LK03.

### Example 21

### FIX Protein Expression in Mouse Plasma after Injection of a Recombinant Adeno-Associated Viral Vector (rAAV), Provided Herein, Encoding Differentially Codon Optimized Modified FIX (R318Y/R338E/T343R)

[0831] The effects of various codon optimization schemes on FIX expression in vivo in a mouse model was examined. The most effective is selected to for expression in primates. The nucleotide sequence for expression of modified FIX (R318Y/R338E/T343R) was optimized differentially and three codon optimized FIX sequences, set forth as SEQ ID NOs: 569, 570 and 571, were assessed. AAV FIX-encoding vectors, using each of the three optimized FIX sequences, were packaged with the capsid KP1 (SEQ ID NO:418). C57BL/6 WT mice were injected with one of the three codon optimized FIX plasmids, and FIX expression was monitored for several weeks.

A. FIX Protein Expression in Plasma after Intravenous Injection of rAAV-Modified FIX in Wild-Type Mice

[0832] C57BL/6 WT mice (4 mice/group) were injected via the tail vein with 5 E+9 vector genomes per kg (vg/kg) (assuming an average mouse weight of 25 g) of rAAV FIX vector containing the modified FIX encoding nucleotide sequence of SEQ ID NO: 569, 570 and 571. The full FIX sequence including the flanked regions are set forth in SEQ ID NOs: 562-564, for SEQ ID NOs: 572-574, respectively. To summarize:

SEQ ID NO: 562 sets forth the sequence of intron-propeptide-mature human FIX R318Y/R338E/T343R; SEQ ID NO:563 sets for the sequence of intron-propeptide-mature human FIX R318Y/R338E/T343R; and SEQ ID NO:564 sets forth the sequence of intron-propeptide-mature human FIX R318Y/R338E/T343R. Each of SEQ ID NOS: 569-571 sets forth an optimized sequence for human FIX R318Y/R338E/T343R.

[0833] Whole blood was collected by phlebotomy of the retro orbital plexus at 1, 2, 3, 4, 5 and 6 weeks post-intravenous dosing and plasma was prepared for bioanalytical assays to assess modified FIX (R318Y/R338E/T343R) expression. Animal number 8, which was among those injected with the FIX encoded by SEQ ID NO: 573 group, died at 3 weeks post-injection. Thus, blood only was collected and analyzed for week 1 and 2 post-injection. Blood collected from the retro orbital plexus of each mouse was diluted in 3.8% sodium citrate and plasma was prepared by centrifugation at 13,000 RPM at 4° C. for three minutes and treated blood samples were placed on dry ice and stored at −80° C. Blood and plasma samples were kept on ice throughout collection and processing.

[0834] FIX concentrations in plasma were determined using a FIX enzyme-linked immunosorbent antigen assay (ELISA) specific for hFIX antigen (ASSERACHROM IX: Ag Enzyme Immunoassay for Factor FIX; Diagnostica Stago, France) essentially according to the manufacturer's instructions using known concentrations of recombinantly expressed modified FIX as controls. Wells of a 96-well plate were coated with 2 μg/mL of anti-human Factor IX antibody (AHIX-5041, Heamatologic Technologies, Essex Vt.) to capture the FIX. Detection of the captured FIX was performed with a goat anti-human FIX polyclonal antibody conjugated with HRP (GAFIX-HRP, Affinity Biologicals, Ontario Canada), at 2 μg/mL. Upon binding of FIX to the FIX antibody, a colorimetric signal was emitted; signal strength is directly proportional to the quantity of FIX. The colorimetric reaction was measured on a Spectra MAX UV/VIS with SOFTmax PRO (Molecular Devices, San Jose, Calif.), and the unknown FIX concentrations in plasma were interpolated from a standard curve ranging from 0.4 ng/mL to 800 ng/mL of recombinantly expressed variant.

[0835] The results show that codon optimized FIX set forth in SEQ ID NOs: 570 and 571 expressed higher in mice than the codon optimized FIX set forth in SEQ ID NO:569. Modified FIX expression (in ng/mL) increased over the six weeks post vector-injection in mice administered the codon optimized FIX set forth in SEQ ID NOs: 570 and 571; whereas modified FIX expression of mice administered the codon optimized FIX set forth in SEQ ID NO: 569 remained stable over the trial period. The modified FIX expression results for each of the 12 individual animals (4 animals per optimized FIX sequence) are set forth in Table 97 below. The average FIX expression for each group of animals administered a vector containing codon optimized modified FIX set forth in SEQ ID NOs: 569-571 are set forth in Table 98, below. Units in each table are μg/mL.

TABLE 97
Modified FIX (R318Y/R338E/T343R) Expression in Individual Animals

| Time | Optimized FIX #1 | | | | Optimized FIX #2 | | | | Optimized FIX #3 | | | |
|---|---|---|---|---|---|---|---|---|---|---|---|---|
| after | (SEQ ID NO: 569) | | | | (SEQ ID NO: 570) | | | | (SEQ ID NO: 571) | | | |
| AAV | Mouse | Mouse | Mouse | Mouse | Mouse | Mouse | Mouse | Mouse | Mouse | Mouse | Mouse | Mouse |
| injection | 1 | 2 | 3 | 4 | 5 | 6 | 7 | 8 | 9 | 10 | 11 | 12 |
| 1 weeks | 2.12 | 2.04 | 2.76 | 1.71 | 3.19 | 2.67 | 3.11 | 4.84 | 2.98 | 2.61 | 3.65 | 3.19 |
| 2 weeks | 2.96 | 2.48 | 3.96 | 2.4 | 5.01 | 3.95 | 5.04 | 4.08 | 5.44 | 5.59 | 6.2 | 4.63 |
| 3 weeks | 2.63 | 2.89 | 3.89 | 2.79 | 6 | 3.36 | 5.93 | n/a | 5.56 | 4.41 | 6.01 | 5.21 |
| 4 weeks | 2.19 | 1.91 | 3.5 | 2.54 | 4.38 | 3.71 | 4.31 | n/a | 4.28 | 3.78 | 5.65 | 4.39 |
| 5 weeks | 2.25 | 1.77 | 3.44 | 2.68 | 4.56 | 3.66 | 4.8 | n/a | 4.63 | 3.95 | 7.04 | 5.44 |
| 6 weeks | 2.31 | 1.88 | 3.19 | 2.51 | 9.24 | 4.2 | 7.08 | n/a | 5.38 | 3.58 | 7.55 | 5.82 |

TABLE 98
Average Modified FIX (R318Y/R338E/T343R) Expression

| | Optimized FIX 1 | Optimized FIX 2 | Optimized FIX 3 |
|---|---|---|---|
| | (SEQ ID NO: 569 | (SEQ ID NO: 570) | (SEQ ID NO: 571) |
| Week 1 | 2.16 | 3.45 | 3.11 |
| Week 2 | 2.95 | 4.52 | 5.47 |
| Week 3 | 3.05 | 5.10 | 5.30 |
| Week 4 | 2.54 | 4.13 | 4.53 |
| Week 5 | 2.54 | 4.34 | 5.27 |
| Week 6 | 2.47 | 6.84 | 5.58 |

### Example 22

### Summary of Exemplary Vectors, Constructs, and Components Thereof

| SEQ | FIX or | | |
|---|---|---|---|
| ID | Construct or | Domains as in SEQ | |
| NO | Vector | Listing | Description |
| 569 | mature FIX | | mature human FIX |
| | optimized 1 | | R318Y/R338E/T343R optimized 1 |
| 570 | mature FIX | | mature human FIX |
| | optimized 2 | | R318Y/R338E/T343R optimized 2 |
| 571 | mature FIX | | mature human FIX |
| | optimized 3 | | R318Y/R338E/T343R optimized 3 |
| 562 | intron-pro-FIX | <221> intron | intron-propeptide-mature human FIX |
| | (optimized 1) | <222> (1) . . . (163) | R318Y/R338E/T343R optimized 1 |
| | | <221> propeptide | |
| | | <222> (164) . . . (214) | |
| | | <221> exon | |
| | | <222> (215) . . . (1459) | |
| | | <221> cloning vector | |
| | | <222> (1468) . . . (1857) | |
| 563 | intron-pro-FIX | same as above | intron-propeptide-mature human FIX |
| | (optimized 2) | | R318Y/R338E/T343R optimized 2 |
| 564 | intron-pro-FIX | same as above | intron-propeptide-mature human FIX |
| | (optimized 3) | | R318Y/R338E/T343R optimized 3 |
| 565 | intron-pro-FIX | <221> intron | intron-propeptide-mature human FIX |
| | | <222> (1) . . . (163) | R318Y/R338E/T343R not optimized |
| | | <221> propeptide | |
| | | <222> (164) . . . (214) | |
| | | <221> exon | |
| | | <222> (215) . . . (1459) | |
| | | <221> cloning vector | |
| | | <222> (1468) . . . (1858) | |
| 566 | intron-pro-FIX | <221> intron | intron-propeptide-mature human FIX |
| | optimized | <222> (1) . . . (163) | R318Y/R338E/T343R optimized 3 |
| | | <221> propeptide | (low CpG) |
| | | <222> (164) . . . (214) | |
| | | <221> exon | |
| | | <222> (215) . . . (1459) | |
| | | <221> cloning vector | |
| | | <222> (1468) . . . (1857) | |
| 572 | SEQ ID NO: | amp: 7021-7125 + 1-20 | AAV-hFIX (R318Y/R338E/T343R) |
| | 451 vector with | ColE1/pMB1/pBR322/pUC | optimized 1 |
| | Pro-FIX from | ori Rep: 572-1160 | |
| | SEQ ID NO: | CAP binding site: 1448-1469 | |
| | 562/569 | lac operon promoter: 1484- | |
| | (optimized 1) | 1514 | |
| | | Left ITR: 1597-1715 | |
| | | ApoE/C1 gene locus | |
| | | (enhancer): 1781-2101 | |
| | | huSerpin A antitrypsin liver | |
| | | promoter (partial): 2111-2503 | |
| | | kozak: 2598-2603 | |
| | | FIX Signal Sequence: 2604- | |
| | | 2687 | |
| | | FIX Propeptide: 2688-2690; | |
| | | 4129-4179 | |
| | | FIX partial intron: 2691-4128 | |
| | | FIX Propeptide: 4129-4179 | |
| | | (from new seq) | |
| | | FIX Mature: 4180-5424 | |
| | | bGH poly(A) signal: 5539- | |
| | | 5763 | |
| | | Right ITR: 5877-6006 | |
| 573 | SEQ ID NO: | amp: 7021-7125 + 1-20 | AAV-hFIX (R318Y/R338E/T343R) |
| | 451 vector with | ColE1/pMB1/pBR322/pUC | optimized 2 |
| | Pro-FIX from | ori Rep: 572-1160 | |
| | SEQ ID NO: | CAP binding site: 1448-1469 | |
| | 563/570 | lac operon promoter: 1484- | |
| | (optimized 2) | 1514 | |
| | | Left ITR: 1597-1715 | |
| | | ApoE/C1 gene locus | |
| | | (enhancer): 1781-2101 | |
| | | huSerpin A antitrypsin liver | |
| | | promoter (partial): 2111-2503 | |
| | | kozak: 2598-2603 | |
| | | FIX Signal Sequence: 2604- | |
| | | 2687 | |
| | | FIX Propeptide: 2688-2690; | |
| | | 4129-4179 | |
| | | FIX partial intron: 2691-4128 | |
| | | FIX Propeptide: 4129-4179 | |
| | | (from new seq) | |
| | | FIX Mature: 4180-5424 | |
| | | bGH poly(A) signal: 5539- | |
| | | 5763 | |
| | | Right ITR: 5877-6006 | |
| 574 | SEQ ID NO: | amp: 7021-7125 + 1-20 | AAV-hFIX (R318Y/R338E/T343R) |
| | 451 vector with | ColE1/pMB1/pBR322/pUC | optimized 3 |
| | Pro-FIX from | ori Rep: 572-1160 | |
| | SEQ ID NO: | CAP binding site: 1448-1469 | |
| | 564/571 | lac operon promoter: 1484- | |
| | (optimized 3) | 1514 | |
| | | Left ITR: 1597-1715 | |
| | | ApoE/C1 gene locus | |
| | | (enhancer): 1781-2101 | |
| | | huSerpin A antitrypsin liver | |
| | | promoter (partial): 2111-2503 | |
| | | kozak: 2598-2603 | |
| | | FIX Signal Sequence: 2604- | |
| | | 2687 | |
| | | FIX Propeptide: 2688-2690; | |
| | | 4129-4179 | |
| | | FIX partial intron: 2691-4128 | |
| | | FIX Propeptide: 4129-4179 | |
| | | (from new seq) | |
| | | FIX Mature: 4180-5424 | |
| | | bGH poly(A) signal: 5539- | |
| | | 5763 | |
| | | Right ITR: 5877-6006 | |
| 575 | SEQ ID NO: | amp: 7021-7125 + 1-20 | AAV-human FIX |
| | 451 vector with | ColE1/pMB1/pBR322/pUC | R318Y/R338E/T343R optimized |
| | Pro-FIX from | ori Rep: 572-1160 | |
| | SEQ ID NO: | CAP binding site: 1448-1469 | |
| | 566 (optimized) | lac operon promoter: 1484- | |
| | | 1514 | |
| | | Left ITR: 1597-1715 | |
| | | ApoE/C1 gene locus | |
| | | (enhancer): 1781-2101 | |
| | | huSerpin A antitrypsin liver | |
| | | promoter (partial): 2111-2503 | |
| | | kozak: 2598-2603 | |
| | | FIX Signal Sequence: 2604- | |
| | | 2687 | |
| | | FIX Propeptide: 2688-2690; | |
| | | 4129-4179 | |
| | | FIX partial intron: 2691-4128 | |
| | | FIX Propeptide: 4129-4179 | |
| | | FIX Mature: 4180-5424 | |
| | | bGH poly(A) signal: 5539- | |
| | | 5763 | |
| | | Right ITR: 5877-6006 | |

[0837] Since modifications will be apparent to those of skill in this art, it is intended that this invention be limited only by the scope of the appended claims.

1. An adeno-associated viral (AAV) vector comprising:
a capsid that transduces human hepatocytes with greater transduction efficiency, or to a greater extent with a lower amount of AAV introduced, compared to the AAV capsid designated DJ/8 (SEQ ID NO: 427, capsid polypeptide); and
a nucleic acid construct that encodes a modified Factor IX (FIX) polypeptide encapsulated in the capsid, wherein:
the nucleic acid construct comprises inverted terminal repeats (ITRs) from an adeno-associated virus, flanking nucleic acid encoding the modified FIX polypeptide;
the nucleic acid construct encoding the modified FIX polypeptide comprises all or a portion of a FIX gene intron, whereby expression of the encoded FIX polypeptide is increased in a human cell or a human compared to expression of the FIX polypeptide without the intron;
the encoded modified FIX polypeptide comprises one or more of an insertion, deletion, and replacement of amino acid(s) in an unmodified FIX polypeptide;
the unmodified FIX polypeptide comprises a sequence of amino acid residues set forth in any of SEQ ID NOs: 2, 3, 20 and 325, or is a catalytically active fragment thereof; and
the encoded modified FIX polypeptide, when in activated form, has coagulation activity of at least about 7 times the coagulation activity of the activated form of wild-type FIX of SEQ ID NO:3 or SEQ ID NO:20.

2. The AAV vector of claim 1, wherein the capsid that transduces hepatocytes is a chimeric capsid comprising a mixture of sequences from two or more of AAV1, AAV6, AAV3B, and AAV8; and
the vector transduces hepatocytes with greater efficiency than each of AAV1, AAV6, AAV3B, and AAV8.

3. The AAV vector of claim 1, wherein the intron is all or a portion of the first intron of human FIX (hFIX), wherein:
the portion is sufficient to increase expression of the encoded FIX polypeptide in a human cell or a human to whom the construct is administered for gene therapy; and
the first intron of FIX comprises the sequence of nucleotides set forth in SEQ ID NO:434, or a sequence having at least 95% sequence identity therewith.

4. The AAV vector of claim 3, wherein the portion comprises at least 10%, at least 12%, at least 15%, at least 16%, or at least 20% of the intron or of the sequence having at least 98% sequence identity with the intron, whereby expression of the encoded FIX polypeptide is increased in a human cell or a human compared to expression of the FIX polypeptide without the intron.

5. The AAV vector of claim 1, wherein the intron comprises the sequence of nucleotides set forth in SEQ ID NO:433, or a sequence having at least 98% sequence identity therewith, or the intron consists of the sequence of nucleotides set forth in SEQ ID NO:433.

6. The AAV vector of claim 1, wherein:
the intron or portion thereof is inserted between the nucleotides encoding amino acid residues corresponding to residues 29 and 30 of the unmodified FIX polypeptide of SEQ ID NO:2; and
corresponding residues are identified by alignment with SEQ ID NO:2 or with SEQ ID NO:3.

7. The AAV vector of claim 1, wherein the encoded modified FIX polypeptide, when in activated form, has greater than 20-fold activity compared to the activity of the activated form of wild-type FIX of SEQ ID NO: 2, 3, 20, or 325.

8. The AAV vector of claim 1, wherein the construct comprises nucleic acid encoding the FIX signal sequence, the first residue of the propeptide, the intron portion, and the remaining residues of the FIX polypeptide, including the remaining residues of the propeptide and mature FIX polypeptide.

9. The AAV vector of claim 1, wherein:
the construct, with reference to the unmodified FIX polypeptide of SEQ ID NO:2, comprises, in the following order: nucleic acid encoding the signal sequence, residue 1 of the propeptide, the intron or portion thereof, residues 2-18 of the propeptide, and residues corresponding to residues 47-461 of the mature FIX polypeptide; and
residue positions are determined by alignment with SEQ ID NO:2.

10. The AAV vector of claim 1, wherein:
the modified FIX polypeptide comprises:
an amino acid replacement T343R, T343E, or T343D, or the same replacement at a corresponding amino acid residue in an unmodified FIX polypeptide; and
an amino acid replacement R338E or R338D, or the same replacement at a corresponding amino acid residue in an unmodified FIX polypeptide; wherein:
the unmodified FIX polypeptide comprises the sequence of amino acids set forth in SEQ ID NO: 2, 3, 20, or 325, or a catalytically active fragment thereof; and
amino acid residue positions are referenced by mature numbering, and identified by alignment with SEQ ID NO:3.

11. The AAV vector of claim 10, wherein:
the modified FIX polypeptide comprises amino acid replacements corresponding to R338E/T343R; and
the unmodified FIX polypeptide comprises the sequence of amino acids set forth in SEQ ID NO:2, 3, 20, or 325, or a catalytically active fragment thereof.

12. The AAV vector of claim 11, wherein:
the modified FIX polypeptide comprises an amino acid replacement corresponding to R318Y, whereby the FIX polypeptide comprises amino acid replacements corresponding to R318Y/R338E/T343R; and
the unmodified FIX polypeptide comprises the sequence of amino acids set forth in SEQ ID NO: 2, 3, 20, or 325, or a catalytically active fragment thereof.

13. The AAV vector of claim 12, wherein:
the modified FIX polypeptide comprises the sequence of amino acids set forth in SEQ ID NO:394 or an activated two-chain FIXa form thereof; or
the modified FIX polypeptide comprises the sequence of amino acids set forth in SEQ ID NO:394 in which residue 148 is A (alanine) as set forth in SEQ ID NO:490, or is an activated two-chain FIXa form thereof; or
the modified FIX polypeptide comprises a sequence having at least 95% sequence identity with the sequence of amino acids set forth in SEQ ID NO:394 or an activated two-chain FIXa form thereof, and containing the amino acid replacements corresponding to R318Y/R338E/T343R.

14. The AAV vector of claim 1, wherein:
the modified FIX polypeptide comprises the amino acid replacement corresponding to R338L; and
the unmodified FIX polypeptide comprises the sequence of amino acids set forth in SEQ ID NO: 2, 3, 20, or 325, or a catalytically active fragment thereof.

15. The AAV vector of claim 1, wherein:
the modified FIX polypeptide comprises amino acid replacements selected from among the replacements R318Y/R338E/R403E/E410N, R318Y/R338E/T343R/R403E/E410N, R318Y/R338E/T343R/E410N, Y155F/R318Y/R338E/T343R/R403E, Y155F/K228N/K247N/N249S/R318Y/R338E/T343R/R403E/E410N, Y155F/K247N/N249S/R318Y/R338E/T343R/R403E, R318Y/R338E/T412A, K247N/N249S/R318Y/R338E/T343R/R403E, R318Y/R338E/T343R, Y155F/K247N/N249S/R318Y/R338E/T343R, K228N/R318Y/R338E/T343R/R403E/E410N, K228N/K247N/N249S/R318Y/R338E/T343R/R403E, R318Y/R338E/T343R/R403E/E410S, Y155F/K247N/N249S/R318Y/R338E, K247N/N249S/R318Y/R338E/T343R, R318Y/T343R/E410N, Y155F/R318Y/R338E/R403E, R318Y/R338E/R403E, R318Y/R338E/E410N, K228N/R318Y/E410N, R318Y/R403E/E410N, D203N/F205T/R318Y/E410N, A103N/N105S/R318Y/R338E/R403E/E410N, D104N/K106S/R318Y/R338E/R403E/E410N, K228N/R318Y/R338E/R403E/E410N, I251S/R318Y/R338E/R403E/E410N, D104N/K106S/I251S/R318Y/R338E/R403E/E410N, D104N/K106S/R318Y/R338E/E410N, I251S/R318Y/E410N/R338E, D104N/K106S/I251S/R318Y/R338E/E410N, A103N/N105S/K247N/N249S/R318Y/R338E/R403E/E410N, D104N/K106S/K247N/N249S/R318Y/R338E/R403E/E410N, K228N/K247N/N249S/R318Y/R338E/R403E/E410N, A103N/N105S/Y155F/R318Y/R338E/R403E/E410N, D104N/K106S/Y155F/R318Y/R338E/R403E/E410N, Y155F/K228N/R318Y/R338E/R403E/E410N, Y155F/I251S/R318Y/R338E/R403E/E410N, K247N/N249S/R318Y/R338E/R403E/E410N, Y155F/R318Y/R338E/R403E/E410N, K247N/N249S/R318Y/R338E/E410N, Y155F/R318Y/R338E/E410N, Y155F/K247N/N249S/R318Y/R338E/E410N, R318Y/R338E/R403E/E410S, R318Y/R338E/R403E/E410N/T412V, R318Y/R338E/R403E/E410N/T412A, R318Y/R338E/R403E/T412A, R318Y/R338E/E410S, R318Y/R338E/T412A, R318Y/R338E/E410N/T412V, D85N/K228N/R318Y/R338E/R403E/E410N, N260S/R318Y/R338E/R403E/E410N, R318Y/R338E/N346D/R403E/E410N, Y155F/R318Y/R338E/N346D/R403E/E410N, K247N/N249S/N260S/R318Y/R338E/R403E/E410N, D104N/K106S/N260S/R318Y/R338E/R403E/E410N, Y155F/N260S/R318Y/R338E/R403E/E410N, Y155F/R318Y/R338E/T343R/R403E/E410N, D104N/K106S/Y155F/K247N/N249S/R318Y/R338E/R403E/E410N, D104N/K106S/K228N/K247N/N249S/R318Y/R338E/R403E/E410N, Y155F/K228N/K247N/N249S/R318Y/R338E/R403E/E410N, Y155F/K247N/N249S/N260S/R318Y/R338E/R403E/E410N, D104N/K106S/R318Y/R338E/T343R/R403E/E410N, R318Y/R338E/N346Y/R403E/E410N, R318Y/R338E/T343R/N346Y/R403E/E410N, R318Y/R338E/T343R/N346D/R403E/E410N, R318Y/R338E/Y345A/R403E/E410N, K228N/I251S/R318Y/R338E/R403E/E410N, R318Y/R338E/Y345A/N346D/R403E/E410N, Y155F/K247N/N249S/R318Y/R338E/R403E, K247N/N249S/R318Y/R338E/R403E, Y155F/K247N/N249S/R318Y/R403E/E410N, K247N/N249S/R318Y/R403E/E410N, R318Y/R338E/T343R/R403E, Y155F/R318Y/R338E/T343R/E410N, R318Y/T343R/R403E/E410N, Y155F/R318Y/T343R/R403E/E410N, Y155F/K247N/N249S/R318Y/R338E/T343R/R403E/E410N, K247N/N249S/R318Y/R338E/T343R/R403E/E410N, Y155F/K228N/I251S/R318Y/R338E/R403E/E410N, N260S/R318Y/R338E/T343R/R403E/E410N, Y155F/N260S/R318Y/R338E/T343R/R403E/E410N, K228N/K247N/N249S/R318Y/R338E/T343R/R403E/E410N, Y155F/K247N/N249S/R318Y/R403E, Y155F/K247N/N249S/R318Y/E410N, K247N/N249S/R318Y/R338E/T343R/E410N, Y155F/K247N/N249S/R318Y/R338E/T343R/E410N, Y155F/K247N/N249S/R318Y/T343R/R403E/E410N, K247N/N249S/R318Y/T343R/R403E/E410N, Y155F/K247N/N249S/R318Y/T343R/R403E, K247N/N249S/R318Y/T343R/R403E, Y155F/K247N/N249S/R318Y/T343R/E410N, K247N/N249S/R318Y/T343R/E410N, Y155F/R318Y/R338E/T343R, Y155F/R318Y/T343R/R403E, Y155F/R318Y/T343R/E410N, K228N/K247N/N249S/R318Y/R338E/T343R/E410N, Y155F/K247N/N249S/R318Y/T343R, Y155F/K247N/N249S/R318Y/R338E/R403E/E410N, K228N/K247N/N249S/R318Y/T343R/R403E/E410N, and Y155F/R318Y/R403E/E410N, or the same replacements at corresponding amino acid residues in an unmodified FIX polypeptide; wherein:
numbering is with respect to the mature FIX polypeptide of SEQ ID NO:3; and
the unmodified FIX polypeptide comprises the sequence of amino acids set forth in SEQ ID NO: 2, 3, 20, or 325, or a catalytically active fragment thereof.

16. The AAV vector of claim 1, wherein:
the encoded modified FIX polypeptide comprises the amino acid replacement R338L;
amino acid residue numbering is with respect to the mature FIX polypeptide of SEQ ID NO:3; and
the unmodified FIX polypeptide comprises the sequence of amino acids set forth in SEQ ID NO: 2, 3, 20, or 325, or a catalytically active fragment thereof.

17. The AAV vector of claim 1, wherein:
the mature portion of FIX, corresponding to residues 1-415 of SEQ ID NO:3, is encoded by the sequence of nucleotides set forth in any of SEQ ID NOs:483-487; and
the portion encoding the modified FIX polypeptide and the intron comprises the sequence of nucleotides set forth in any of SEQ ID NOs:462-467.

18. The AAV vector of claim 1, wherein the codons are optimized for expression in a human cell or a mouse cell.

19. The AAV vector of claim 18, wherein:
a) codon optimized sequences are set forth in any of SEQ ID NOs:518-520, wherein SEQ ID NOs:518-520 are as follows:

| | | |
|---|---|---|
| 518 | encodes 47-461 | hWT-FIX mature codon optimized with |
| | | a stringency of 0.5 optimization; |
| 519 | encodes 47-461 | hWT-FIX-mature codon optimized with |
| | | a stringency 0.8 optimization; and |
| 520 | encodes 47-461 | hWT-FIX-mature codon optimized with |
| | | a stringency 1.0 optimization; or |

b) the nucleic acid encoding the mature modified FIX polypeptide, corresponding to residues 47-461 of SEQ ID NO:2, and residues 1-415 of SEQ ID NO:3, has the sequence of nucleotides set forth in any of SEQ ID NOs:521-526, wherein SEQ ID NOs:521-526 are as follows:

| | | |
|---|---|---|
| 521 | encodes 47-461 | human FIX R318Y/R338E/T343R |
| | | mature codon optimized with a |
| | | stringency of 0.5 optimization; |
| 522 | encodes 47-461 | human FIX R318Y/R338E/T343R |
| | | mature codon optimized with a |
| | | stringency of 0.8 optimization; |
| 523 | encodes 47-461 | human FIX R318Y/R338E/T343R |
| | | mature codon optimized with a |
| | | stringency of 1.0 optimization; |
| 524 | encodes 47-461 | human FIX R338L mature codon |
| | | optimized with a stringency of |
| | | 0.5 optimization; |
| 525 | encodes 47-461 | human FIX R338L mature codon |
| | | optimized with as tringency |
| | | of 0.8 optimization; and |
| 526 | encodes 47-461 | human FIX R338L mature codon |
| | | optimized with a stringency of |
| | | 1.0 optimization; or |

c) the nucleic acid sequence corresponding to the nucleic acid encoding residues 30-461 of SEQ ID NO:2 has the sequence of nucleotides set forth in any of SEQ ID NOs:527-529, wherein SEQ ID NOs:527-529 are as follows:

| | | |
|---|---|---|
| 527 | encodes 30-461 | hWT-FIX codon optimized with |
| | | a stringency of 0.5 optimization; |
| 528 | encodes 30-461 | hWT-FIX codon optimized with a |
| | | stringency of 0.8 optimization; and |
| 529 | encodes 30-461 | hWT-FIX codon optimized with a |
| | | stringency of 1.0 optimization; or |

d) the nucleic acid encoding the modified FIX polypeptide, corresponding to residues 30-461 of SEQ ID NO:2, comprises the sequence of nucleotides set forth in any of SEQ ID NOs:530-535, wherein SEQ ID NOs:530-535 are as follows:

| | | |
|---|---|---|
| 530 | encodes 30-461 | human FIX R318Y/R338E/T343R codon |
| | | optimized with a stringency of |
| | | 0.5 optimization; |
| 531 | encodes 30-461 | human FIX R318Y/R338E/T343R codon |
| | | optimized with a stringency of |
| | | 0.8 optimization; |
| 532 | encodes 30-461 | human FIX R318Y/R338E/T343R codon |
| | | optimized with a stringency of |
| | | 1.0 optimization; |
| 533 | encodes 30-461 | human FIX R338L codon optimized with |
| | | a stringency of 0.5 optimization; |
| 534 | encodes 30-461 | human FIX R338L codon optimized with |
| | | a stringency of 0.8 optimization; and |
| 535 | encodes 30-461 | human FIX R338L codon optimized with |
| | | a stringency of 1.0 optimization; or |

e) the nucleic acid encoding the signal sequence, the partial intron, and the modified human FIX polypeptide comprises the sequence of nucleotides set forth in any of SEQ ID NOs:536-553, wherein SEQ ID NOs:536-553 are as follows:

| | | |
|---|---|---|
| 536 | precursor + intron | hFIXss-Pro-mini Intron-Pro-human wild type FIX optimized 0.5; |
| 537 | precursor + intron | hFIXss-Pro-mini Intron-Pro-human wild type FIX optimized 0.8; |
| 538 | precursor + intron | hFIXss-Pro-mini Intron-Pro-human wild type FIX optimized 1.0; |
| 539 | precursor + intron | hFIXss-Pro-mini Intron-Pro-human FIX R318Y/R338E/T343R |
| | | optimized 0.5; |
| 540 | precursor + intron | hFIXss-Pro-mini Intron-Pro-human FIX R318Y/R338E/T343R |
| | | optimized 0.8; |
| 541 | precursor + intron | hFIXss-Pro-mini Intron-Pro-human FIX R318Y/R338E/T343R |
| | | optimized 1.0; |
| 542 | precursor + intron | hFIXss-Pro-mini Intron-Pro-human FIX R338L optimized 0.5; |
| 543 | precursor + intron | hFIXss-Pro-mini Intron-Pro-human FIX R338L optimized 0.8; |
| 544 | precursor + intron | hFIXss-Pro-mini Intron-Pro-human FIX R338L optimized 1.0; |
| 545 | precursor + intron | mouse optimized hFIXss-Pro-mini Intron-Pro-human wild type |
| | | FIX optimized 0.5; |
| 546 | precursor + intron | mouse optimized hFIXss-Pro-mini Intron-Pro-human wild type |
| | | FIX optimized 0.8; |
| 547 | precursor + intron | mouse optimized hFIXss-Pro-mini Intron-Pro-human wild type |
| | | FIX optimized 1.0; |
| 548 | precursor + intron | mouse optimized hFIXss-Pro-mini Intron-Pro-human FIX |
| | | R318Y/R338E/T343R optimized 0.5; |
| 549 | precursor + intron | mouse optimized hFIXss-Pro-mini Intron-Pro-human FIX |
| | | R318Y/R338E/T343R optimized 0.8; |
| 550 | precursor + intron | mouse optimized hFIXss-Pro-mini Intron-Pro-human FIX |
| | | R318Y/R338E/T343R optimized 1.0; |
| 551 | precursor + intron | mouse optimized hFIXss-Pro-mini Intron-Pro-human FIX R338L |
| | | optimized 0.5; |
| 552 | precursor + intron | mouse optimized hFIXss-Pro-mini Intron-Pro-human FIX R338L |
| | | optimized 0.8; and |
| 553 | precursor + intron | mouse optimized hFIXss-Pro-mini Intron-Pro-human FIX R338L |
| | | optimized 1.0. |

20. The AAV vector of claim 18, wherein the cell is a human liver cell.

21. The AAV vector of claim 18, wherein the portion encoding the modified FIX polypeptide and the intron comprises the sequence of nucleotides set forth in SEQ ID NO:466.

22. The AAV vector of claim 21, comprising 2 ITRs flanking the nucleic acid encoding the modified FIX polypeptide with the intron, wherein each ITR is an AAV ITR, or a chimeric or hybrid AAV ITR.

23. The AAV vector of claim 22, wherein an ITR is selected from among:
an ITR that comprises the sequence of nucleotides set forth in SEQ ID NO: 435 or 437, or ITRs encoded by nucleotides 1-119 and 4281-4410 of SEQ ID NO:456, or an ITR encoded by any of SEQ ID NOs:436 and 501-511.

24. The AAV vector of claim 1, comprising transcription regulatory sequences operatively linked to the nucleic acid, for transcription of the nucleic acid encoding the modified FIX polypeptide.

25. The AAV vector of claim 24, wherein the regulatory sequences are liver-specific.

26. The AAV vector of claim 1, comprising a promoter, and optionally, additional regulatory sequences operatively linked for expression of the nucleic acid encoding the modified FIX polypeptide.

27. The AAV vector of claim 26, wherein the promoter is a liver-specific or hepatocyte-specific promoter.

28. The AAV vector of claim 1, comprising the sequence of nucleotides set forth in any of SEQ ID NOs: 456-461 and 572-575.

29. The AAV vector of claim 1, comprising codons that are optimized for expression in a human cell, wherein the modified FIX polypeptide is encoded by the sequence of nucleotides set forth in any of SEQ ID NOs:569-571, or the intron-propeptide-mature human FIX polypeptide comprising the replacements R318Y/R338E/T343R is encoded by the sequence of nucleotides set forth in any of SEQ ID NOs:562-566.

30. The AAV vector of claim 1, comprising the sequence of nucleotides set forth in SEQ ID NO:460 or as set forth in SEQ ID NO:460, except where the modified FIX polypeptide is encoded by the sequence of nucleotides set forth in any of SEQ ID NOs:569-571, or except where the intron-propeptide-modified FIX polypeptide is encoded by the sequence of nucleotides set forth in any of SEQ ID NOs:562-566.

31. The AAV vector of claim 1 that comprises a sequence of nucleotides set forth in any of SEQ ID NOs:447-455, except where the modified FIX polypeptide is encoded by the sequence of nucleotides set forth in any of SEQ ID NOs:569-571, or except where the intron-propeptide-modified FIX polypeptide is encoded by the sequence of nucleotides set forth in any of SEQ ID NOs:562-566.

32. The AAV vector of claim 1, wherein the capsid that transduces hepatocytes transduces human and mouse hepatocytes with substantially the same efficiency or to the same extent.

33. The AAV vector of claim 1, wherein the capsid that transduces hepatocytes also transduces islet cells.

34. The AAV vector of claim 1, wherein the capsid comprises the sequence of amino acids set forth in any of SEQ ID NOs:418-420 and 492-500, or a sequence having at least 95% sequence identity therewith.

35. The AAV vector of claim 1, wherein the capsid is designated KP-1, KP-2, or KP-3.

36. The AAV vector of claim 1, wherein the capsid is encoded by the sequence of nucleotides set forth in any of SEQ ID NOs:421-423, or a sequence having at least 95% sequence identity therewith.

37. The AAV vector of claim 36 that encodes a modified FIX polypeptide comprising the sequence of amino acids set forth in SEQ ID NO:394, or in SEQ ID NO:394 in which residue 148 is A as set forth in SEQ ID NO:490.

38. The AAV vector of claim 1, comprising the nucleic acid construct whose sequence is set forth in SEQ ID NO:460 or in SEQ ID NO:461.

39. An AAV vector comprising:
a capsid designated LK03 of SEQ ID NO:429 or 561, or a capsid having at least 95% sequence identity therewith; and
a nucleic acid construct that encodes a modified FIX polypeptide encapsulated in the capsid, wherein:
the nucleic acid construct comprises inverted terminal repeats (ITRs) from an adeno-associated virus, flanking nucleic acid encoding the modified FIX polypeptide;
the nucleic acid construct encoding the modified FIX polypeptide comprises all or a portion of a FIX gene intron;
the intron is all or a portion of the first intron of human FIX (hFIX);
the intron comprises the sequence of nucleotides set forth in SEQ ID NO:433, or a sequence having at least 98% sequence identity therewith;
the portion of the intron is sufficient to increase expression of the encoded modified FIX polypeptide in a human cell or a human to whom the construct is administered for gene therapy;
the encoded modified FIX polypeptide comprises one or more of an insertion, deletion, and replacement of amino acids in an unmodified FIX polypeptide;
the insertion(s), deletion(s), and replacement(s) of amino acids comprise amino acid replacements that correspond to R338E/T343R, or R318Y, or R318Y/R338E/T343R;
corresponding residues are identified by alignment with SEQ ID NO:2 or SEQ ID NO:3;
the unmodified FIX polypeptide comprises the sequence of amino acids set forth in any of SEQ ID NOs: 2, 3, 20, and 325, or a catalytically active fragment thereof; and
the encoded modified FIX polypeptide, when in activated form, has coagulation activity of at least about 7 times the coagulation activity of the activated form of wild-type FIX of SEQ ID NO:3 or SEQ ID NO:20.

40. The AAV vector of claim 39, wherein the intron consists of the sequence of nucleotides set forth in SEQ ID NO:433.

41. The AAV vector of claim 39, wherein:
the intron or portion thereof is inserted between the nucleotides encoding amino acid residues corresponding to residues 29 and 30 of the unmodified FIX polypeptide of SEQ ID NO:2; and
corresponding residues are identified by alignment with SEQ ID NO:2 or SEQ ID NO:3.

42. The AAV vector of claim 39, wherein the construct, with reference to the unmodified FIX polypeptide of SEQ ID NO:2, comprises, in the following order: nucleic acid encoding the signal sequence, residue 1 of the propeptide, the intron or portion thereof, residues 2-18 of the propeptide, and residues corresponding to residues 47-461 of the mature FIX polypeptide, wherein residue positions are determined by alignment with SEQ ID NO:2.

43. The AAV vector of claim 42, wherein the encoded modified FIX polypeptide comprises the sequence of amino acids set forth in SEQ ID NO:394.

44. The AAV vector of claim 43, wherein the modified FIX polypeptide is encoded by the sequence of nucleotides set forth in any of SEQ ID NOs: 569-571.

45. The AAV vector of claim 39, wherein the capsid comprises the sequence of amino acids set forth in SEQ ID NO:429 or 561.

46. A nucleic acid construct, comprising inverted terminal repeats (ITRs) from an adeno-associated virus, flanking nucleic acid encoding a modified FIX polypeptide, wherein:
the construct comprises all or a portion of the FIX first gene intron, wherein:
the first intron of FIX comprises the sequence of nucleotides set forth in SEQ ID NO:434, or a sequence having at least 95% sequence identity therewith; and
the portion is sufficient to increase expression of the encoded modified FIX polypeptide in a human cell or a human to whom the construct is administered for gene therapy;
the intron is inserted after or downstream from nucleic acid encoding the signal sequence in the nucleic acid encoding the modified FIX polypeptide;
the encoded modified FIX polypeptide comprises one or more of an insertion, deletion, and replacement of amino acids;
the insertion(s), deletion(s), or replacement(s) comprise R318Y, or R338E/T343R, or R338L, or combinations thereof;
corresponding residues are identified by alignment with SEQ ID NO:2 or with SEQ ID NO:3;
the unmodified FIX polypeptide comprises the sequence of amino acids set forth in any of SEQ ID NOs: 2, 3, 20, and 325, or is a catalytically active fragment thereof; and
the encoded modified FIX polypeptide, when in activated form, has coagulation activity of at least about 7 times the coagulation activity of the activated form of wild-type FIX of SEQ ID NO:3 or SEQ ID NO:20.

47. The nucleic acid construct of claim 46, wherein:
the portion of the intron comprises at least 15%, at least 16%, or at least 20% of the intron, or of a sequence having at least 95% or 98% sequence identity therewith, whereby expression of the encoded modified FIX polypeptide is increased in a human cell or a human compared to expression of the modified FIX polypeptide without the intron; and
the first intron of FIX comprises the sequence of nucleotides set forth in SEQ ID NO:434.

48. The nucleic acid construct of claim 46 that comprises nucleic acid encoding the FIX signal sequence, the first residue of the propeptide, the intron, and the remaining residues of the modified FIX polypeptide, including the remaining residues of the propeptide and mature FIX polypeptide.

49. The nucleic acid construct of claim 46, wherein the construct, with reference to the unmodified FIX polypeptide of SEQ ID NO:2, comprises the signal sequence (residues 1-28), residue 1 of the propeptide, the intron, residues 2-18 of the propeptide, and residues corresponding to residues 47-461 of the mature FIX polypeptide, wherein residue positions are determined by alignment with SEQ ID NO:2.

50. The nucleic acid construct of claim 46, wherein the modified FIX polypeptide comprises the sequence of amino acids set forth in SEQ ID NO:394, or SEQ ID NO:394 in which residue 148 is A as set forth in SEQ ID NO:490, or a sequence having at least 95% sequence identity with the sequence of amino acids set forth in SEQ ID NO:394 and containing the replacements corresponding to R318Y/R338E/T343R.

51. The nucleic acid construct of claim 46, wherein:
the mature portion of FIX, corresponding to residues 1-415 of SEQ ID NO:3, is encoded by the sequence of nucleotides set forth in any of SEQ ID NOs:483-487; or
the portion encoding the modified FIX polypeptide and the intron comprises the sequence of nucleotides set forth in any of SEQ ID NOs:462-467.

52. The nucleic acid construct of claim 46, wherein the codons encoding the modified FIX polypeptide are optimized for expression in a human cell or a mouse cell.

53. The nucleic acid construct of claim 46, wherein the nucleotides encoding the modified FIX polypeptide comprise the sequence of nucleotides set forth in any of SEQ ID NOs:569-571.

54. The nucleic acid construct of claim 46, wherein the nucleotides encoding the modified FIX polypeptide comprise the sequence of nucleotides set forth in any of SEQ ID NOs:562-566.

55. The nucleic acid construct of claim 46, wherein the portion encoding the modified FIX polypeptide and the partial intron comprises the sequence of nucleotides set forth in SEQ ID NO:466.

56. A vector, comprising the nucleic acid construct of claim 46, wherein the vector comprises the sequence of nucleotides of any of SEQ ID NOs:448-455, or a sequence having at least 95% sequence identity therewith that encodes the modified FIX polypeptide that comprises the amino acid replacements that correspond to R338E/T343R, or R318Y, or R318Y/R338E/T343R.

57. A pharmaceutical composition, comprising the AAV vector of claim 1 in a pharmaceutically acceptable vehicle.

58. The pharmaceutical composition of claim 57, wherein the AAV vector encodes a modified FIX polypeptide comprising the sequence of amino acids set forth in SEQ ID NO:394, or SEQ ID NO:394 in which residue 148 is A as set forth in SEQ ID NO:490.

59. The pharmaceutical composition of claim 57 that is formulated for systemic administration.

60. The pharmaceutical composition of claim 57 that is formulated for intravenous administration or is formulated for direct administration into the liver.

61. A method of treating hemophilia, comprising administering the AAV vector of claim 1 to a subject who has hemophilia.

62. The method of claim 61, wherein the AAV vector comprises the capsid designated KP-1, KP-2, KP-3, or LK-03.

63. The method of claim 61, wherein the subject has hemophilia B.

64. The method of claim 62, wherein the modified FIX polypeptide encoded in the AAV vector comprises the sequence of amino acids set forth in SEQ ID NO:394, or SEQ ID NO:394 in which residue 148 is A as set forth in SEQ ID NO:490.

65. The method of claim 61, wherein the AAV vector is administered intravenously, or intramuscularly, or by direct injection into the liver.

66. A method of producing an AAV vector encoding a modified FIX polypeptide, comprising packaging the nucleic acid construct of claim 46 into a capsid comprising the sequence of amino acids set forth in any of SEQ ID NOs:418-420 and 492-500.

67. The method of claim 66, wherein the encoded modified FIX polypeptide comprises the sequence of amino acids set forth in SEQ ID NO:394, or SEQ ID NO:394 in which residue 148 is A as set forth in SEQ ID NO:490.

68. The AAV vector of claim 1, wherein the modified FIX polypeptide contains up to 10 amino acid modifications, or has at least 95% sequence identity to the unmodified FIX polypeptide of any of SEQ ID NOs: 2, 3, 20, and 325.

The application's sequence listing, which the Patent Office published only in electronic form, follows.

SEQUENCE LISTING (575 sequences)

SEQ ID NO: 1 - DNA, 1383 bp, Homo sapiens
  Factor IX mRNA
  sig_peptide (1)...(84)
  misc_feature (85)...(138): propeptide
  mat_peptide (139)...(1383): zymogen
atgcagcgcgtgaacatgatcatggcagaatcaccaggcctcatcaccatctgccttttaggatatctactcagtgctgaatgtacagtttttcttgatcatgaaaacgccaacaaaattctgaatcggccaaagaggtataattcaggtaaattggaagagtttgttcaagggaaccttgagagagaatgtatggaagaaaagtgtagttttgaagaagcacgagaagtttttgaaaacactgaaagaacaactgaattttggaagcagtatgttgatggagatcagtgtgagtccaatccatgtttaaatggcggcagttgcaaggatgacattaattcctatgaatgttggtgtccctttggatttgaaggaaagaactgtgaattagatgtaacatgtaacattaagaatggcagatgcgagcagttttgtaaaaatagtgctgataacaaggtggtttgctcctgtactgagggatatcgacttgcagaaaaccagaagtcctgtgaaccagcagtgccatttccatgtggaagagtttctgtttcacaaacttctaagctcacccgtgctgagactgtttttcctgatgtggactatgtaaattctactgaagctgaaaccattttggataacatcactcaaagcacccaatcatttaatgacttcactcgggttgttggtggagaagatgccaaaccaggtcaattcccttggcaggttgttttgaatggtaaagttgatgcattctgtggaggctctatcgttaatgaaaaatggattgtaactgctgcccactgtgttgaaactggtgttaaaattacagttgtcgcaggtgaacataatattgaggagacagaacatacagagcaaaagcgaaatgtgattcgaattattcctcaccacaactacaatgcagctattaataagtacaaccatgacattgcccttctggaactggacgaacccttagtgctaaacagctacgttacacctatttgcattgctgacaaggaatacacgaacatcttcctcaaatttggatctggctatgtaagtggctggggaagagtcttccacaaagggagatcagctttagttcttcagtaccttagagttccacttgttgaccgagccacatgtcttcgatctacaaagttcaccatctataacaacatgttctgtgctggcttccatgaaggaggtagagattcatgtcaaggagatagtgggggaccccatgttactgaagtggaagggaccagtttcttaactggaattattagctggggtgaagagtgtgcaatgaaaggcaaatatggaatatataccaaggtatcccggtatgtcaactggattaaggaaaaaacaaagctcact

SEQ ID NO: 2 - protein, 461 aa, Homo sapiens
  Precursor Factor IX
  SIGNAL (1)...(28)
  PROPEP (29)...(46)
MQRVNMIMAESPGLITICLLGYLLSAECTVFLDHENANKILNRPKRYNSGKLEEFVQGNLERECMEEKCSFEEAREVFENTERTTEFWKQYVDGDQCESNPCLNGGSCKDDINSYECWCPFGFEGKNCELDVTCNIKNGRCEQFCKNSADNKVVCSCTEGYRLAENQKSCEPAVPFPCGRVSVSQTSKLTRAETVFPDVDYVNSTEAETILDNITQSTQSFNDFTRVVGGEDAKPGQFPWQVVLNGKVDAFCGGSIVNEKWIVTAAHCVETGVKITVVAGEHNIEETEHTEQKRNVIRIIPHHNYNAAINKYNHDIALLELDEPLVLNSYVTPICIADKEYTNIFLKFGSGYVSGWGRVFHKGRSALVLQYLRVPLVDRATCLRSTKFTIYNNMFCAGFHEGGRDSCQGDSGGPHVTEVEGTSFLTGIISWGEECAMKGKYGIYTKVSRYVNWIKEKTKLT

SEQ ID NO: 3 - protein, 415 aa, Homo sapiens
  Mature Factor IX
YNSGKLEEFVQGNLERECMEEKCSFEEAREVFENTERTTEFWKQYVDGDQCESNPCLNGGSCKDDINSYECWCPFGFEGKNCELDVTCNIKNGRCEQFCKNSADNKVVCSCTEGYRLAENQKSCEPAVPFPCGRVSVSQTSKLTRAETVFPDVDYVNSTEAETILDNITQSTQSFNDFTRVVGGEDAKPGQFPWQVVLNGKVDAFCGGSIVNEKWIVTAAHCVETGVKITVVAGEHNIEETEHTEQKRNVIRIIPHHNYNAAINKYNHDIALLELDEPLVLNSYVTPICIADKEYTNIFLKFGSGYVSGWGRVFHKGRSALVLQYLRVPLVDRATCLRSTKFTIYNNMFCAGFHEGGRDSCQGDSGGPHVTEVEGTSFLTGIISWGEECAMKGKYGIYTKVSRYVNWIKEKTKLT

SEQ ID NO: 4 - protein, 461 aa, Pan troglodytes
  Chimpanzee Factor IX
MQRVNMIMAESPGLITICLLGYLLSAECTVFLDHENANKILNRPKRYNSGKLEEFVQGNLERECMEEKCSFEEAREVFENTERTTEFWKQYVDGDQCESNPCLNGGSCKDDINSYECWCPFGFEGKNCELDVTCNIKNGRCEQFCKNSADNKVVCSCTEGYRLAENQKSCEPAVPFPCGRVSVSQTSKLTRAETVFPDVDYVNSTEAETILDNITQSTQSFNDFTRVVGGEDAKPGQFPWQVVLNGKVDAFCGGSIVNEKWIVTAAHCVDTGVKITVVAGEHNIEETEHTEQKRNVIRIIPHHNYNAAINKYNHDIALLELDEPLVLNSYVTPICIADKEYTNIFLKFGSGYVSGWGRVFHKGRSALVLQYLRVPLVDRATCLRSTKFTIYNNMFCAGFHEGGRDSCQGDSGGPHVTEVEGTSFLTGIISWGEECAMKGKYGIYTKVSRYVNWIKEKTKLT

SEQ ID NO: 5 - protein, 461 aa, Macaca mulatta
  Rhesus macaque Factor IX
MQRVNMIMAESPGLITICLLGYLLSAECTVFLDHENANKILNRPKRYNSGKLEEFVQGNLERECMEEKCNFEEAREVFENTEKTTEFWKQYVDGDQCESNPCLNGGSCKDDINSYECWCPFGFEGKNCELDVTCNIKNGRCKQFCKNTADNKVVCSCTEGYRLAENQRSCEPAVPFPCGRVSVSQTSTLTRAETVFPDVEYVNSTEAETILDNITQSTQSFNDFTRVVGGEDAKPGQFPWQVVLNGKVDAFCGGSIVNEKWVVTAAHCVETDAKITVVAGEHNIEETEHTEQKRNVIRIIPHHNYNATINKYNHDIALLELDEPLVLNSYVTPICIADKEYTNIFLKFGSGYVSGWGRVFNKGRSASVLQYLRVPLVDRATCLRSTKFTIYNNMFCAGFHEGGRDSCQGDSGGPHVTEVEGTSFLTGIISWGEECAMKGKYGIYTKVSRYVNWIKEKTKLT

SEQ ID NO: 6 - protein, 471 aa, Mus musculus
  Mouse Factor IX
MKHLNTVMAESPALITIFLLGYLLSTECAVFLDRENATKILTRPKRYNSGKLEEFVRGNLERECIEERCSFEEAREVFENTEKTTEFWKQYVDGDQCESNPCLNGGICKDDISSYECWCQVGFEGRNCELDATCNIKNGRCKQFCKNSPDNKVICSCTEGYQLAEDQKSCEPTVPFPCGRASISYSSKKITRAETVFSNMDYENSTEAVFIQDDITDGAILNNVTESSESLNDFTRVVGGENAKPGQIPWQVILNGEIEAFCGGAIINEKWIVTAAHCLKPGDKIEVVAGEYNIDKKEDTEQRRNVIRTIPHHQYNATINKYSHDIALLELDKPLILNSYVTPICVANREYTNIFLKFGSGYVSGWGKVFNKGRQASILQYLRVPLVDRATCLRSTTFTIYNNMFCAGYREGGKDSCEGDSGGPHVTEVEGTSFLTGIISWGEECAMKGKYGIYTKVSRYVNWIKEKTKLT

SEQ ID NO: 7 - protein, 282 aa, Rattus norvegicus
  Rat Factor IX
RVSVAYNSKKITRAETVFSNTDYGNSTELILDDITNSTILDNLTENSEPINDFTRVVGGENAKPGQIPWQVILNGEIEAFCGGAIINEKWIVTAAHCLKPGDKIEVVAGEHNIDEKEDTEQRRNVIRTIPHHQYNATINKYSHDIALLELDKPLILNSYVTPICVANKEYTNIFLKFGSGYVSGWGKVFNKGRQASILQYLRVPLVDRATCLRSTKFSIYNNMFCAGYREGGKDSCEGDSGGPHVTEVEGTSFLTGIISWGEECAMKGKYGIYTKVSRYVNW

SEQ ID NO: 8 - protein, 285 aa, Cavia porcellus
  Guinea pig Factor IX
RVSIPSVSKEHNRANAIFSRMGYVNFTDDETIWDDNDDDETIWDNSTESTKPSDEFFRVVGGEDAKPGQFPWQVLLNGETEAFCGGSIVNEKWIVTAAHCILPGIKIEVVAGKHNIEKKEDTEQRRNVTQIILHHSYNASFNKYSHDIALLELDKPLSLNSYVTPICIANREYTNIFLKFGAGYVSGWGKLFSQGRTASILQYLRVPLVDRATCLRSTKFTIYNNMFCAGFHEGGRDSCQGDSGGPHVTEVEGTNFLTGIISWGEECAMKGKYGIYTKVSRYVNW

SEQ ID NO: 9 - protein, 409 aa, Sus scrofa
  Pig Factor IX
YNSGKLEESFVRGNLERECIEEKCSFEEAREVFENTEKTNEFWKQYVDGDQCEPNPCLNGGLCKDDINSYECWCQVGFEGKNCELDATCNIKNGRCKQFCKTGADSKVLCSCTTGYRLAPDQKSCKPAVPFPCGRVSVSHSPTTLTRAEIIFSNMDYENSTEVEPILDSLTESNQSSDDFIRIVGGENAKPGQFPWQVLLNGKIDAFCGGSIINEKWVVTAAHCIEPGVKITVVAGEYNTEETEPTEQRRNVIRAIPHHSYNATVNKYSHDIALLELDEPLTLNSYVTPICIADKEYTNIFLKFGSGYVSGWGRVFNRGRSATILQYLKVPLVDRATCLRSTKVTIYSNMFCAGFHEGGKDSCLGDSGGPHVTEVEGTSFLTGIISWGEECAVKGKYGIYTKVSRYVNW

SEQ ID NO: 10 - protein, 452 aa, Canis familiaris
  Dog Factor IX
MAEASGLVTVCLLGYLLSAECAVFLDRENATKILSRPKRYNSGKLEEFVRGNLERECIEEKCSFEEAREVFENTEKTTEFWKQYVDGDQCESNPCLNDGVCKDDINSYECWCRAGFEGKNCELDVTCNIKNGRCKQFCKLGPDNKVVCSCTTGYQLAEDQRSCEPAVPFPCGRVSVPHISMTRTRAETLFSNMDYENSTEVEKILDNVTQPLNDFTRVVGGKDAKPGQFPWQVLLNGKVDAFCGGSIINEKWVVTAAHCIEPDVKITIVAGEHNTEKREHTEQKRNVIRTILHHSYNATINKYNHDIALLELDEPLTLNSYVTPICIADREYSNIFLKFGSGYVSGWGRVFNKGRSASILQYLKVPLVDRATCLRSTKFTIYNNMFCAGFHEGGKDSCQGDSGGPHVTEVEGISFLTGIISWGEECAMKGKYGIYTKVSRYVNWIKEKTKLT

SEQ ID NO: 11 - protein, 466 aa, Felis catus
  Cat Factor IX
MRCLNMIMAEPPGLITICLLGYLLGADCTVFLDHEDATKVLSRPKRYNSGKLEEFVQGNLERECMEEKCSFEEAREVFENTEKTTEFWKQYVDGDQCESNPCLNGGICKDDINSYECWCQTGFEGKNCELDVTCNIKNGRCKQFCKLDADNKVVCSCTTGYQLAEDQKSCEPAVPFPCGRVSVPHISTTHTRAETLFLNMDYENSTTDYENSAEAEKNVDNVTQPLNDLTRIVGGKTAKPGQFPWQVLLKGKIDAFCGGSIINEKWVVTAAHCINPDVEITVVAGEHNTEETEHTEQKRNVIRTILHHSYNASVNKYSHDIALLELDEPLTLNSYVTPICVADREYTNTFLKFGYGYVSGWGKVFNKGRPATILQYLKVPLVDRATCLRSTKFTIYNNMFCAGFHEGGKDSCQGDSGGPHVTEVEGINFLTGIISWGEECAMKGKYGIYTKVSRYVNWIKEKTKLT

SEQ ID NO: 12 - protein, 275 aa, Oryctolagus cuniculus
  Rabbit Factor IX
GVSVSHASKKITRATTIFSNTEYENFTEAETIRGNVTQRSQSSDDFTRIVGGENAKPGQFPWQVLLNGKVEAFCGGSIINEKWVVTAAHCIKPDDNITVVAGEYNIQETENTEQKRNVIRIIPYHKYNATINKYNHDIALLELDKPLTLNSYVTPICIANREYTNIFLNFGSGYVSGWGRVFNRGRQASILQYLRVPFVDRATCLRSTKFTIYNNMFCAGFDVGGKDSCEGDSGGPHVTEVEGTSFLTGIISWGEECAIKGKYGVYTRVSWYVNW

SEQ ID NO: 13 - protein, 471 aa, Gallus gallus
  Chicken Factor IX
MAKIPLILSFCLLEAFLGAESTVFIENKEASTVLSRTRRGNSNRLEELIPGNLERECIEEKCSFEEAREVFENTEKTMEFWKIYIDGDQCNSNPCKNGAVCKDGVSSYECMCPPGYGGRNCEIDSTCATKNGGCEHFCRHDTPQKAVCSCASGYKLHEDGKSCKPAVPYPCGRITAPEMRGKVTRTENTIERWNITAHDEGDAHDEALDITEPPPPPTTSAAPAKIVPITKNDTRVVGGYDSVKGQLPWQVHLVDSRGLGFCGGSIINEKWVVTAAHCLEPGDNVTAVAGEYNTKEDDHTEQRRQVVKILPYPTYNRTRNKHHNDIALLELDQPLTFNSYVTPICIGSRDFTNNLLSNGPGTVSGWGSMLYRGRSAIVLQVLTVPFVDRVTCLKSTSTTILHSMFCAGYTAGGKDTCGGDSGGPYTNSIGETWFLTGVTSWGEECAKPGKYGIYTKVAKYVKWIRETTRLT

SEQ ID NO: 14 - protein, 416 aa, Bos taurus
  Cow Factor IX
YNSGKLEEFVRGNLERECKEEKCSFEEAREVFENTEKTTEFWKQYVDGDQCESNPCLNGGMCKDDINSYECWCQAGFEGTNCELDATCSIKNGRCKQFCKRDTDNKVVCSCTDGYRLAEDQKSCEPAVPFPCGRVSVSHISKKLTRAETIFSNTNYENSSEAEIIWDNVTQSNQSFDEFSRVVGGEDAERGQFPWQVLLHGEIAAFCGGSIVNEKWVVTAAHCIKPGVKITVVAGEHNTEKPEPTEQKRNVIRAIPYHSYNASINKYSHDIALLELDEPLELNSYVTPICIADRDYTNIFSKFGYGYVSGWGKVFNRGRSASILQYLKVPLVDRATCLRSTKFSIYSHMFCAGYHEGGKDSCQGDSGGPHVTEVEGTSFLTGIISWGEECAMKGKYGIYTKVSRYVNWIKEKTKLT

SEQ ID NO: 15 - protein, 274 aa, Ovis aries
  Sheep Factor IX
RASVLHTSKKLTRAETIFSNMNYENSSEAEIIWDNVTQSNQSFDDFNRVVGGEDAARGQFPWQVLLHGEIAAFCGGSIVNEKWVVTAAHCIKPGVKITVVAGEHNTEKPEPTEQKRNVIRAIPYHGYNASINKYSHDIALLELDEPLELNSYVTPICIADREYTNIFLKFGYGYVSGWGRVFNRGRSASILQYLKVPLVDRATCLRSTKFTIYNHMFCAGYHEGGKDSCQGDSGGPHVTEVEGTSFLTGIISWGEECAMKGKYGIYTKVSRYEV

SEQ ID NO: 16 - protein, 463 aa, Xenopus tropicalis
  Frog Factor IX
MVAFSSILIIYLLTSLCSTEKAVFLSDESASSLLVRQKRYNTGRLEEWVAGNLERECLEEKCNYEEAREVFENDDKTKEFWKQYIDGDQCLSNPCLNGGVCKDDVSDYVCWCQQGYSGKNCELELPVICSIMNGGCDHMCRDDPVKKVICSCASGYKLAENGKTCEAAVPYPCGRVSSPEALPKEETRSFLDSLEQNLTSAAHPNITDQEKPKEDIVPVTVDPNVRIVGGTDSLKGEFPWQVHLVNKDNLGFCSGSIINEKWIVTAAHCFLIRGEFKVVAGEHNTEVSDGTEQHHKVTRIILYPAYNATRSKYNNDIALLELEKPLELNDYVRPVCIGNMDFTEKLLKRNAFSMVSGWGDLGYKGRPAVILQKLAVPYINQAACKKSSRFSIYANMFCAGYSDESKDTCQGDSGGPHVTEYKNLWFLTGITSWGEKCAEKDKYGVYTRLSRFTDWIRTTTKIS

SEQ ID NO: 17 - protein, 503 aa, Danio rerio
  Zebrafish Factor IX
MASFILVLFPFLLLQAALGSVFLDGEKADSVLWRRRRANTWLFEEFLPGNVERECIEEKCVLEEAREAFENDEKTMEFWASYVDGNQCKPSPCQNQGTCEDQMGTYSCNCLARFCWQNCEIVTAKKCDVDNGGCEHFCVLLESHKTQCRVHMDTNSQKMDFTCEPIVKFPCGKTSKPAVKTFGTASVTNTTAQSSNKTIKSTSSIPKPDNLTNPTNSKDIKEKLAPPRAKLPKWAFEEYLTSPAPTVSGLKSRIIGGNSALPGEIPWQVALVSRSTQQVFCGGSILNPLWVITAAHCLLGNHNGSFYIRVGEHDVSKIEGTEQNVDVIKLISHPRYNSKVSLFNHDIALLRLRSPIRLTPTVRPICLGPMVFSNTLLQSGTLATVSGWGRVRFQGRSAATLQKIELPYVDRTVCKESSSDPITHFMFCAGHSDSPKDACQGDSGGPHVMRYHNTWFLTGIISWGEECAKKGKYGVYTQVGNYYRWIQHTMGVTTGALLTNVDQ

SEQ ID NO: 18 - protein, 537 aa, Takifugu rubripes
  Japanese pufferfish Factor IX
MARDFLLALIAALLLEVSGLPTEGSTGGVFVSPQAANMVLLRQRRYNSGHLEELQKDNLERECKEEQCTMEEAREVFEDDEKTAEFWVGYIDGDQCVPPPCQNEGVCKDGINSYVCWCKPDFSGRNCEIEVSKQCSVNNGGCSHFCVMQGDISVCHCAVGHRLGLDKKSCEPTDQFSCGHINMSFSSKSNVQRRSLMQKLEANRTFSSILLGDYSDNSTELYDYIESMDWAPPNTTMIDPRSGRTSSVGPDQNRSSLTEDLISVSETEIPYWAFPTLPTIPEKENTDQRIVGGDEALPGEIPWQVTLMSHSVILQRAEPFCGGSLFSDLWVITAAHCLINEKIAKQGILHSSREHDVSKDEGPERDHTVAEQHIHFMYDYKKSPYNHDIALLKLNKPVELSNKRRPICLGPKDFTETLLRESTSSLVSGWGRIKFFGLEATKLQKLEVPYVDRTRCKQSSREQVTRYMFCAGYQLQAKDSCQGDSGGPHATKYKDTWFLTGIVSWGEECAKDGKYGIYTRVSRYYPWISQKTGLQMS

SEQ ID NO: 19 - protein, 245 aa, Bos taurus
  Mature chymotrypsin
CGVPAIQPVLSGLSRIVNGEEAVPGSWPWQVSLQDKTGFHFCGGSLINENWVVTAAHCGVTTSDVVVAGEFDQGSSSEKIQKLKIAKVFKNSKYNSLTINNDITLLKLSTAASFSQTVSAVCLPSASDDFAAGTTCVTTGWGLTRYTNANTPDRLQQASLPLLSNTNCKKYWGTKIKDAMICAGASGVSSCMGDSGGPLVCKKNGAWTLVGIVSWGSSTCSTSTPGVYARVTALVNWVQQTLAAN

SEQ ID NO: 20 - protein, 415 aa, Homo sapiens
  BeneFIX, recombinant Factor IX
YNSGKLEEFVQGNLERECMEEKCSFEEAREVFENTERTTEFWKQYVDGDQCESNPCLNGGSCKDDINSYECWCPFGFEGKNCELDVTCNIKNGRCEQFCKNSADNKVVCSCTEGYRLAENQKSCEPAVPFPCGRVSVSQTSKLTRAEAVFPDVDYVNSTEAETILDNITQSTQSFNDFTRVVGGEDAKPGQFPWQVVLNGKVDAFCGGSIVNEKWIVTAAHCVETGVKITVVAGEHNIEETEHTEQKRNVIRIIPHHNYNAAINKYNHDIALLELDEPLVLNSYVTPICIADKEYTNIFLKFGSGYVSGWGRVFHKGRSALVLQYLRVPLVDRATCLRSTKFTIYNNMFCAGFHEGGRDSCQGDSGGPHVTEVEGTSFLTGIISWGEECAMKGKYGIYTKVSRYVNWIKEKTKLT

SEQ ID NO: 21 - protein, 464 aa, Homo sapiens
  Antithrombin III
MYSNVIGTVTSGKRKVYLLSLLLIGFWDCVTCHGSPVDICTAKPRDIPMNPMCIYRSPEKKATEDEGSEQKIPEATNRRVWELSKANSRFATTFYQHLADSKNDNDNIFLSPLSISTAFAMTKLGACNDTLQQLMEVFKFDTISEKTSDQIHFFFAKLNCRLYRKANKSSKLVSANRLFGDKSLTFNETYQDISELVYGAKLQPLDFKENAEQSRAAINKWVSNKTEGRITDVIPSEAINELTVLVLVNTIYFKGLWKSKFSPENTRKELFYKADGESCSASMMYQEGKFRYRRVAEGTQVLELPFKGDDITMVLILPKPEKSLAKVEKELTPEVLQEWLDELEEMMLVVHMPRFRIEDGFSLKEQLQDMGLVDLFSPEKSKLPGIVAEGRDDLYVSDAFHKAFLEVNEEGSEAAASTAVVIAGRSLNPNRVTFKANRPFLVFIREVPLNTIIFMGRVANPCVK

SEQ ID NO: 22 - protein, 432 aa, Homo sapiens [sequence omitted]

SEQ ID NO: 23 - DNA, 4194 bp, Artificial Sequence
  pFUSE-hIgG1-Fc2 vector
ggatctgcgatcgctccggtgcccgtcagtgggcagagcgcacatcgcccacagtccccgagaagttggggggaggggtcggcaattgaacgggtgcctagagaaggtggcgcggggtaaactgggaaagtgatgtcgtgtactggctccgcctttttcccgagggtgggggagaaccgtatataagtgcagtagtcgccgtgaacgttctttttcgcaacgggtttgccgccagaacacagctgaagcttcgaggggctcgcatctctccttcacgcgcccgccgccctacctgaggccgccatccacgccggttgagtcgcgttctgccgcctcccgcctgtggtgcctcctgaactgcgtccgccgtctaggtaagtttaaagctcaggtcgagaccgggcctttgtccggcgctcccttggagcctacctagactcagccggctctccacgctttgcctgaccctgcttgctcaactctacgtctttgtttcgttttctgttctgcgccgttacagatccaagctgtgaccggcgcctacctgagatcaccggcgaaggagggccaccatgtacaggatgcaactcctgtcttgcattgcactaagtcttgcacttgtcacgaattcgatatcggccatggttagatctgacaaaactcacacatgcccaccgtgcccagcacctgaactcctggggggaccgtcagtcttcctcttccccccaaaacccaaggacaccctcatgatctcccggacccctgaggtcacatgcgtggtggtggacgtgagccacgaagaccctgaggtcaagttcaactggtacgtggacggcgtggaggtgcataatgccaagacaaagccgcgggaggagcagtacaacagcacgtaccgtgtggtcagcgtcctcaccgtcctgcaccaggactggctgaatggcaaggagtacaagtgcaaggtctccaacaaagccctcccagcccccatcgagaaaaccatctccaaagccaaagggcagccccgagaaccacaggtgtacaccctgcccccatcccgggaggagatgaccaagaaccaggtcagcctgacctgcctggtcaaaggcttctatcccagcgacatcgccgtggagtgggagagcaatgggcagccggagaacaactacaagaccacgcctcccgtgctggactccgacggctccttcttcctctacagcaagctcaccgtggacaagagcaggtggcagcaggggaacgtcttctcatgctccgtgatgcacgaggctctgcacaaccactacacgcagaagagcctctccctgtctccgggtaaatgagtgctagctggccagacatgataagatacattgatgagtttggacaaaccacaactagaatgcagtgaaaaaaatgctttatttgtgaaatttgtgatgctattgctttatttgtaaccattataagctgcaataaacaagttaacaacaacaattgcattcattttatgtttcaggttcagggggaggtgtgggaggttttttaaagcaagtaaaacctctacaaatgtggtatggaattaattctaaaatacagcatagcaaaactttaacctccaaatcaagcctctacttgaatccttttctgagggatgaataaggcataggcatcaggggctgttgccaatgtgcattagctgtttgcagcctcaccttctttcatggagtttaagatatagtgtattttcccaaggtttgaactagctcttcatttctttatgttttaaatgcactgacctcccacattccctttttagtaaaatattcagaaataatttaaatacatcattgcaatgaaaataaatgttttttattaggcagaatccagatgctcaaggcccttcataatatcccccagtttagtagttggacttagggaacaaaggaacctttaatagaaattggacagcaagaaagcgagcttctagcttatcctcagtcctgctcctctgccacaaagtgcacgcagttgccggccgggtcgcgcagggcgaactcccgcccccacggctgctcgccgatctcggtcatggccggcccggaggcgtcccggaagttcgtggacacgacctccgaccactcggcgtacagctcgtccaggccgcgcacccacacccaggccagggtgttgtccggcaccacctggtcctggaccgcgctgatgaacagggtcacgtcgtcccggaccacaccggcgaagtcgtcctccacgaagtcccgggagaacccgagccggtcggtccagaactcgaccgctccggcgacgtcgcgcgcggtgagcaccggaacggcactggtcaacttggccatgatggctcctcctgtcaggagaggaaagagaagaaggttagtacaattgctatagtgagttgtattatactatgcagatatactatgccaatgattaattgtcaaactagggctgcagggttcatagtgccacttttcctgcactgccccatctcctgcccaccctttcccaggcatagacagtcagtgacttaccaaactcacaggagggagaaggcagaagcttgagacagacccgcgggaccgccgaactgcgaggggacgtggctagggcggcttcttttatggtgcgccggccctcggaggcagggcgctcggggaggcctagcggccaatctgcggtggcaggaggcggggccgaaggccgtgcctgaccaatccggagcacataggagtctcagccccccgccccaaagcaaggggaagtcacgcgcctgtagcgccagcgtgttgtgaaatgggggcttgggggggttggggccctgactagtcaaaacaaactcccattgacgtcaatggggtggagacttggaaatccccgtgagtcaaaccgctatccacgcccattgatgtactgccaaaaccgcatcatcatggtaatagcgatgactaatacgtagatgtactgccaagtaggaaagtcccataaggtcatgtactgggcataatgccaggcgggccatttaccgtcattgacgtcaatagggggcgtacttggcatatgatacacttgatgtactgccaagtgggcagtttaccgtaaatactccacccattgacgtcaatggaaagtccctattggcgttactatgggaacatacgtcattattgacgtcaatgggcgggggtcgttgggcggtcagccaggcgggccatttaccgtaagttatgtaacgcctgcaggttaattaagaacatgtgagcaaaaggccagcaaaaggccaggaaccgtaaaaaggccgcgttgctggcgtttttccataggctccgcccccctgacgagcatcacaaaaatcgacgctcaagtcagaggtggcgaaacccgacaggactataaagataccaggcgtttccccctggaagctccctcgtgcgctctcctgttccgaccctgccgcttaccggatacctgtccgcctttctcccttcgggaagcgtggcgctttctcatagctcacgctgtaggtatctcagttcggtgtaggtcgttcgctccaagctgggctgtgtgcacgaaccccccgttcagcccgaccgctgcgccttatccggtaactatcgtcttgagtccaacccggtaagacacgacttatcgccactggcagcagccactggtaacaggattagcagagcgaggtatgtaggcggtgctacagagttcttgaagtggtggcctaactacggctacactagaagaacagtatttggtatctgcgctctgctgaagccagttaccttcggaaaaagagttggtagctcttgatccggcaaacaaaccaccgctggtagcggtggtttttttgtttgcaagcagcagattacgcgcagaaaaaaaggatctcaagaagatcctttgatcttttctacggggtctgacgctcagtggaacgaaaactcacgttaagggattttggtcatggctagttaattaacatttaaatcagcggccgcaataaaatatctttattttcattacatctgtgtgttggttttttgtgtgaatcgtaactaacatacgctctccatcaaaacaaaacgaaacaaaacaaactagcaaaataggctgtccccagtgcaagtgcaggtgccagaacatttctctatcgaa

SEQ ID NO: 24 - DNA, 25 bp, Artificial Sequence
  pFUSE-Acc-F1 forward primer
gtgctagctggccagacatgataag

SEQ ID NO: 25 - DNA, 27 bp, Artificial Sequence
  pFUSE-Acc-R3 reverse primer
catggtggccctccttcgccggtgatc

SEQ ID NO: 26 - DNA, 36 bp, Artificial Sequence
  Factor IX-wtsp-Invivo-F1 forward primer
cgaaggagggccaccatgcagcgcgtgaacatgatc

SEQ ID NO: 27 - DNA, 40 bp, Artificial Sequence
  Factor IX-Invivo-R1 reverse primer
tgtctggccagctagcacttaagtgagctttgttttttcc

SEQ ID NO: 28 - DNA, 31 bp, Artificial Sequence
  F9-A[103]N/N[105]S-For
gtaaaaatagtaatgatagcaaggtggtttg

SEQ ID NO: 29 - DNA, 42 bp, Artificial Sequence
  F9-D[104]N/K[106]S-For
gtaaaaatagtgctaataacagtgtggtttgctcctgtactg

SEQ ID NO: 30 - DNA, 33 bp, Artificial Sequence
  F9-K[106]N/V[108]S-For
gtgctgataacaatgtgagttgctcctgtactg

SEQ ID NO: 31 - DNA, 28 bp, Artificial Sequence
  F9-D[85]N-For
gaactgtgaattaaatgtaacatgtaac

SEQ ID NO: 32 - DNA, 33 bp, Artificial Sequence
  F9-T[148]A-For
ctcacccgtgctgaggctgtttttcctgatgtg

SEQ ID NO: 33 - DNA, 37 bp, Artificial Sequence
  F9-D39N/F41T-For
gaatggtaaagttaatgcaacctgtggaggctctatc

SEQ ID NO: 34 - DNA, 29 bp, Artificial Sequence
  F9-K63N-For
gaaactggtgttaacattacagttgtcgc

SEQ ID NO: 35 - DNA, 26 bp, Artificial Sequence
  F9-I86S-For
gcgaaatgtgagtcgaattattcctc

SEQ ID NO: 36 - DNA, 31 bp, Artificial Sequence
  F9-A95bS-For
caactacaatgcaagtattaataagtacaac

SEQ ID NO: 37 - DNA, 34 bp, Artificial Sequence
  F9-K243N-For
aaggaaaaaacaaatctcacttaagtgctagctg

SEQ ID NO: 38 - DNA, 25 bp, Artificial Sequence
  F9-E240N-For
ctggattaagaataaaacaaagctc

SEQ ID NO: 39 - DNA, 36 bp, Artificial Sequence
  F9-E74N-For
caggtgaacataatattaacgagacagaacatacag

SEQ ID NO: 40 - DNA, 39 bp, Artificial Sequence
  F9-T76N/H78S-For
gaacataatattgaggagaacgaaagtacagagcaaaag

SEQ ID NO: 41 - DNA, 42 bp, Artificial Sequence
  F9-K82N/N84S-For
cagaacatacagagcaaaatcgatctgtgattcgaattattc

SEQ ID NO: 42 - DNA, 27 bp, Artificial Sequence
  F9-L153N-For
gggagatcagctaatgttcttcagtac

SEQ ID NO: 43 - DNA, 32 bp, Artificial Sequence
  F9-F145N/H147S-For
ctggggaagagtcaactccaaagggagatcag

SEQ ID NO: 44 - DNA, 35 bp, Artificial Sequence
  F9-K222N/K224S-For
gagtgtgcaatgaacggctcatatggaatatatac

SEQ ID NO: 45 - DNA, 33 bp, Artificial Sequence
  F9-S151N/L153S-For
cttccacaaagggagaaatgcttcagttcttca

SEQ ID NO: 46 - DNA, 40 bp, Artificial Sequence
  F9-N95S-For
cctcaccacaactacagtgcagctattaataagtacaacc

SEQ ID NO: 47 - DNA, 34 bp, Artificial Sequence
  F9-Y117N-For
cttagtgctaaacagcaacgttacacctatttgc

SEQ ID NO: 48 - DNA, 37 bp, Artificial Sequence
  F9-G149N-For
ggaagagtcttccacaaaaacagatcagctttagttc

SEQ ID NO: 49 - DNA, 39 bp, Artificial Sequence
  F9-R150N/A152S-For
gtcttccacaaagggaactcatctttagttcttcagtac

SEQ ID NO: 50 - DNA, 36 bp, Artificial Sequence
  F9-R150A-For
gtcttccacaaaggggcatcagctttagttcttcag

SEQ ID NO: 51 - DNA, 36 bp, Artificial Sequence
  F9-R150E-For
gtcttccacaaaggggaatcagctttagttcttcag

SEQ ID NO: 52 - DNA, 36 bp, Artificial Sequence
  F9-R150Y-For
gtcttccacaaagggtactcagctttagttcttcag

SEQ ID NO: 53 - DNA, 33 bp, Artificial Sequence
  F9-R143Q-For
gtaagtggctggggacaagtcttccacaaaggg

SEQ ID NO: 54 - DNA, 33 bp, Artificial Sequence
  F9-R143A-For
gtaagtggctggggagcagtcttccacaaaggg

SEQ ID NO: 55 - DNA, 33 bp, Artificial Sequence
  F9-R143Y-For
gtaagtggctggggatacgtcttccacaaaggg

SEQ ID NO: 56 - DNA, 33 bp, Artificial Sequence
  F9-R143L-For
gtaagtggctggggactggtcttccacaaaggg

SEQ ID NO: 57 - DNA, 36 bp, Artificial Sequence
  F9-V38M-For
gttttgaatggtaaaatggatgcattctgtggaggc

SEQ ID NO: 58 - DNA, 36 bp, Artificial Sequence
  F9-V38Y-For
gttttgaatggtaaatacgatgcattctgtggaggc

SEQ ID NO: 59 - DNA, 36 bp, Artificial Sequence
  F9-D39M-For
gttttgaatggtaaagttatggcattctgtggaggc

SEQ ID NO: 60 - DNA, 36 bp, Artificial Sequence
  F9-D39Y-For
gttttgaatggtaaagtttacgcattctgtggaggc

SEQ ID NO: 61 - DNA, 42 bp, Artificial Sequence
  F9-A40M-For
gttttgaatggtaaagttgatatgttctgtggaggctctatc

SEQ ID NO: 62 - DNA, 42 bp, Artificial Sequence
  F9-A40Y-For
gttttgaatggtaaagttgattacttctgtggaggctctatc

SEQ ID NO: 63 - DNA, 49 bp, Artificial Sequence
  F9-R233A/K230A-For
caaatatggaatatataccgcagtatccgcatatgtcaactggattaag

SEQ ID NO: 64 - DNA, 49 bp, Artificial Sequence
  F9-R233E/K230E-For
caaatatggaatatataccgaagtatccgaatatgtcaactggattaag

SEQ ID NO: 65 - DNA, 41 bp, Artificial Sequence
  F9-R233A-For
gaatatataccaaggtatccgcatatgtcaactggattaag

SEQ ID NO: 66 - DNA, 41 bp, Artificial Sequence
  F9-R233E-For
gaatatataccaaggtatccgaatatgtcaactggattaag

SEQ ID NO: 67 - DNA, 37 bp, Artificial Sequence
  F9-K230A-For
caaatatggaatatataccgcagtatcccggtatgtc

SEQ ID NO: 68 - DNA, 37 bp, Artificial Sequence
  F9-K230E-For
caaatatggaatatataccgaagtatcccggtatgtc

SEQ ID NO: 69 - DNA, 36 bp, Artificial Sequence
  F9-K126E-For
cctatttgcattgctgacgaagaatacacgaacatc

SEQ ID NO: 70 - DNA, 36 bp, Artificial Sequence
  F9-K126A-For
cctatttgcattgctgacgcagaatacacgaacatc

SEQ ID NO: 71 - DNA, 36 bp, Artificial Sequence
  F9-R165A-For
gttccacttgttgacgcagccacatgtcttcgatct

SEQ ID NO: 72 - DNA, 36 bp, Artificial Sequence
  F9-R165E-For
gttccacttgttgacgaagccacatgtcttcgatct

SEQ ID NO: 73 - DNA, 33 bp, Artificial Sequence
  F9-R170A-For
cgagccacatgtcttgcatctacaaagttcacc

SEQ ID NO: 74 - DNA, 33 bp, Artificial Sequence
  F9-R170E-For
cgagccacatgtcttgaatctacaaagttcacc

SEQ ID NO: 75 - protein, 415 aa, Homo sapiens
  Factor IX N157D
YNSGKLEEFVQGNLERECMEEKCSFEEAREVFENTERTTEFWKQYVDGDQCESNPCLNGGSCKDDINSYECWCPFGFEGKNCELDVTCNIKNGRCEQFCKNSADNKVVCSCTEGYRLAENQKSCEPAVPFPCGRVSVSQTSKLTRAETVFPDVDYVDSTEAETILDNITQSTQSFNDFTRVVGGEDAKPGQFPWQVVLNGKVDAFCGGSIVNEKWIVTAAHCVETGVKITVVAGEHNIEETEHTEQKRNVIRIIPHHNYNAAINKYNHDIALLELDEPLVLNSYVTPICIADKEYTNIFLKFGSGYVSGWGRVFHKGRSALVLQYLRVPLVDRATCLRSTKFTIYNNMFCAGFHEGGRDSCQGDSGGPHVTEVEGTSFLTGIISWGEECAMKGKYGIYTKVSRYVNWIKEKTKLT

SEQ ID NO: 76 - protein, 415 aa, Homo sapiens
  Factor IX Y155F
YNSGKLEEFVQGNLERECMEEKCSFEEAREVFENTERTTEFWKQYVDGDQCESNPCLNGGSCKDDINSYECWCPFGFEGKNCELDVTCNIKNGRCEQFCKNSADNKVVCSCTEGYRLAENQKSCEPAVPFPCGRVSVSQTSKLTRAETVFPDVDFVNSTEAETILDNITQSTQSFNDFTRVVGGEDAKPGQFPWQVVLNGKVDAFCGGSIVNEKWIVTAAHCVETGVKITVVAGEHNIEETEHTEQKRNVIRIIPHHNYNAAINKYNHDIALLELDEPLVLNSYVTPICIADKEYTNIFLKFGSGYVSGWGRVFHKGRSALVLQYLRVPLVDRATCLRSTKFTIYNNMFCAGFHEGGRDSCQGDSGGPHVTEVEGTSFLTGIISWGEECAMKGKYGIYTKVSRYVNWIKEKTKLT

SEQ ID NO: 77 - protein, 415 aa, Homo sapiens
  Factor IX A103N/N105S
YNSGKLEEFVQGNLERECMEEKCSFEEAREVFENTERTTEFWKQYVDGDQCESNPCLNGGSCKDDINSYECWCPFGFEGKNCELDVTCNIKNGRCEQFCKNSNDSKVVCSCTEGYRLAENQKSCEPAVPFPCGRVSVSQTSKLTRAETVFPDVDYVNSTEAETILDNITQSTQSFNDFTRVVGGEDAKPGQFPWQVVLNGKVDAFCGGSIVNEKWIVTAAHCVETGVKITVVAGEHNIEETEHTEQKRNVIRIIPHHNYNAAINKYNHDIALLELDEPLVLNSYVTPICIADKEYTNIFLKFGSGYVSGWGRVFHKGRSALVLQYLRVPLVDRATCLRSTKFTIYNNMFCAGFHEGGRDSCQGDSGGPHVTEVEGTSFLTGIISWGEECAMKGKYGIYTKVSRYVNWIKEKTKLT

SEQ ID NO: 78 - protein, 415 aa, Homo sapiens
  Factor IX D104N/K106S
YNSGKLEEFVQGNLERECMEEKCSFEEAREVFENTERTTEFWKQYVDGDQCESNPCLNGGSCKDDINSYECWCPFGFEGKNCELDVTCNIKNGRCEQFCKNSANNSVVCSCTEGYRLAENQKSCEPAVPFPCGRVSVSQTSKLTRAETVFPDVDYVNSTEAETILDNITQSTQSFNDFTRVVGGEDAKPGQFPWQVVLNGKVDAFCGGSIVNEKWIVTAAHCVETGVKITVVAGEHNIEETEHTEQKRNVIRIIPHHNYNAAINKYNHDIALLELDEPLVLNSYVTPICIADKEYTNIFLKFGSGYVSGWGRVFHKGRSALVLQYLRVPLVDRATCLRSTKFTIYNNMFCAGFHEGGRDSCQGDSGGPHVTEVEGTSFLTGIISWGEECAMKGKYGIYTKVSRYVNWIKEKTKLT

SEQ ID NO: 79 - protein, 415 aa, Homo sapiens
  Factor IX K106N/V108S
YNSGKLEEFVQGNLERECMEEKCSFEEAREVFENTERTTEFWKQYVDGDQCESNPCLNGGSCKDDINSYECWCPFGFEGKNCELDVTCNIKNGRCEQFCKNSADNNVSCSCTEGYRLAENQKSCEPAVPFPCGRVSVSQTSKLTRAETVFPDVDYVNSTEAETILDNITQSTQSFNDFTRVVGGEDAKPGQFPWQVVLNGKVDAFCGGSIVNEKWIVTAAHCVETGVKITVVAGEHNIEETEHTEQKRNVIRIIPHHNYNAAINKYNHDIALLELDEPLVLNSYVTPICIADKEYTNIFLKFGSGYVSGWGRVFHKGRSALVLQYLRVPLVDRATCLRSTKFTIYNNMFCAGFHEGGRDSCQGDSGGPHVTEVEGTSFLTGIISWGEECAMKGKYGIYTKVSRYVNWIKEKTKLT

SEQ ID NO: 80 - protein, 415 aa, Homo sapiens
  Factor IX D85N
YNSGKLEEFVQGNLERECMEEKCSFEEAREVFENTERTTEFWKQYVDGDQCESNPCLNGGSCKDDINSYECWCPFGFEGKNCELNVTCNIKNGRCEQFCKNSADNKVVCSCTEGYRLAENQKSCEPAVPFPCGRVSVSQTSKLTRAETVFPDVDYVNSTEAETILDNITQSTQSFNDFTRVVGGEDAKPGQFPWQVVLNGKVDAFCGGSIVNEKWIVTAAHCVETGVKITVVAGEHNIEETEHTEQKRNVIRIIPHHNYNAAINKYNHDIALLELDEPLVLNSYVTPICIADKEYTNIFLKFGSGYVSGWGRVFHKGRSALVLQYLRVPLVDRATCLRSTKFTIYNNMFCAGFHEGGRDSCQGDSGGPHVTEVEGTSFLTGIISWGEECAMKGKYGIYTKVSRYVNWIKEKTKLT

SEQ ID NO: 81 - protein, 415 aa, Homo sapiens; identical to SEQ ID NO: 20
  Factor IX T148A

SEQ ID NO: 82 - protein, 415 aa, Homo sapiens
  Factor IX K5A
YNSGALEEFVQGNLERECMEEKCSFEEAREVFENTERTTEFWKQYVDGDQCESNPCLNGGSCKDDINSYECWCPFGFEGKNCELDVTCNIKNGRCEQFCKNSADNKVVCSCTEGYRLAENQKSCEPAVPFPCGRVSVSQTSKLTRAETVFPDVDYVNSTEAETILDNITQSTQSFNDFTRVVGGEDAKPGQFPWQVVLNGKVDAFCGGSIVNEKWIVTAAHCVETGVKITVVAGEHNIEETEHTEQKRNVIRIIPHHNYNAAINKYNHDIALLELDEPLVLNSYVTPICIADKEYTNIFLKFGSGYVSGWGRVFHKGRSALVLQYLRVPLVDRATCLRSTKFTIYNNMFCAGFHEGGRDSCQGDSGGPHVTEVEGTSFLTGIISWGEECAMKGKYGIYTKVSRYVNWIKEKTKLT

SEQ ID NO: 83 - protein, 415 aa, Homo sapiens
  Factor IX D64N
YNSGKLEEFVQGNLERECMEEKCSFEEAREVFENTERTTEFWKQYVDGDQCESNPCLNGGSCKNDINSYECWCPFGFEGKNCELDVTCNIKNGRCEQFCKNSADNKVVCSCTEGYRLAENQKSCEPAVPFPCGRVSVSQTSKLTRAETVFPDVDYVNSTEAETILDNITQSTQSFNDFTRVVGGEDAKPGQFPWQVVLNGKVDAFCGGSIVNEKWIVTAAHCVETGVKITVVAGEHNIEETEHTEQKRNVIRIIPHHNYNAAINKYNHDIALLELDEPLVLNSYVTPICIADKEYTNIFLKFGSGYVSGWGRVFHKGRSALVLQYLRVPLVDRATCLRSTKFTIYNNMFCAGFHEGGRDSCQGDSGGPHVTEVEGTSFLTGIISWGEECAMKGKYGIYTKVSRYVNWIKEKTKLT

SEQ ID NO: 84 - protein, 415 aa, Homo sapiens
  Factor IX D64A
YNSGKLEEFVQGNLERECMEEKCSFEEAREVFENTERTTEFWKQYVDGDQCESNPCLNGGSCKADINSYECWCPFGFEGKNCELDVTCNIKNGRCEQFCKNSADNKVVCSCTEGYRLAENQKSCEPAVPFPCGRVSVSQTSKLTRAETVFPDVDYVNSTEAETILDNITQSTQSFNDFTRVVGGEDAKPGQFPWQVVLNGKVDAFCGGSIVNEKWIVTAAHCVETGVKITVVAGEHNIEETEHTEQKRNVIRIIPHHNYNAAINKYNHDIALLELDEPLVLNSYVTPICIADKEYTNIFLKFGSGYVSGWGRVFHKGRSALVLQYLRVPLVDRATCLRSTKFTIYNNMFCAGFHEGGRDSCQGDSGGPHVTEVEGTSFLTGIISWGEECAMKGKYGIYTKVSRYVNWIKEKTKLT

SEQ ID NO: 85 - protein, 415 aa, Homo sapiens
  Factor IX N167D
YNSGKLEEFVQGNLERECMEEKCSFEEAREVFENTERTTEFWKQYVDGDQCESNPCLNGGSCKDDINSYECWCPFGFEGKNCELDVTCNIKNGRCEQFCKNSADNKVVCSCTEGYRLAENQKSCEPAVPFPCGRVSVSQTSKLTRAETVFPDVDYVNSTEAETILDDITQSTQSFNDFTRVVGGEDAKPGQFPWQVVLNGKVDAFCGGSIVNEKWIVTAAHCVETGVKITVVAGEHNIEETEHTEQKRNVIRIIPHHNYNAAINKYNHDIALLELDEPLVLNSYVTPICIADKEYTNIFLKFGSGYVSGWGRVFHKGRSALVLQYLRVPLVDRATCLRSTKFTIYNNMFCAGFHEGGRDSCQGDSGGPHVTEVEGTSFLTGIISWGEECAMKGKYGIYTKVSRYVNWIKEKTKLT

SEQ ID NO: 86 - protein, 415 aa, Homo sapiens
  Factor IX N167Q
YNSGKLEEFVQGNLERECMEEKCSFEEAREVFENTERTTEFWKQYVDGDQCESNPCLNGGSCKDDINSYECWCPFGFEGKNCELDVTCNIKNGRCEQFCKNSADNKVVCSCTEGYRLAENQKSCEPAVPFPCGRVSVSQTSKLTRAETVFPDVDYVNSTEAETILDQITQSTQSFNDFTRVVGGEDAKPGQFPWQVVLNGKVDAFCGGSIVNEKWIVTAAHCVETGVKITVVAGEHNIEETEHTEQKRNVIRIIPHHNYNAAINKYNHDIALLELDEPLVLNSYVTPICIADKEYTNIFLKFGSGYVSGWGRVFHKGRSALVLQYLRVPLVDRATCLRSTKFTIYNNMFCAGFHEGGRDSCQGDSGGPHVTEVEGTSFLTGIISWGEECAMKGKYGIYTKVSRYVNWIKEKTKLT

SEQ ID NO: 87 - protein, 415 aa, Homo sapiens
  Factor IX S61A
YNSGKLEEFVQGNLERECMEEKCSFEEAREVFENTERTTEFWKQYVDGDQCESNPCLNGGACKDDINSYECWCPFGFEGKNCELDVTCNIKNGRCEQFCKNSADNKVVCSCTEGYRLAENQKSCEPAVPFPCGRVSVSQTSKLTRAETVFPDVDYVNSTEAETILDNITQSTQSFNDFTRVVGGEDAKPGQFPWQVVLNGKVDAFCGGSIVNEKWIVTAAHCVETGVKITVVAGEHNIEETEHTEQKRNVIRIIPHHNYNAAINKYNHDIALLELDEPLVLNSYVTPICIADKEYTNIFLKFGSGYVSGWGRVFHKGRSALVLQYLRVPLVDRATCLRSTKFTIYNNMFCAGFHEGGRDSCQGDSGGPHVTEVEGTSFLTGIISWGEECAMKGKYGIYTKVSRYVNWIKEKTKLT

SEQ ID NO: 88 - protein, 415 aa, Homo sapiens
  Factor IX S53A
YNSGKLEEFVQGNLERECMEEKCSFEEAREVFENTERTTEFWKQYVDGDQCEANPCLNGGSCKDDINSYECWCPFGFEGKNCELDVTCNIKNGRCEQFCKNSADNKVVCSCTEGYRLAENQKSCEPAVPFPCGRVSVSQTSKLTRAETVFPDVDYVNSTEAETILDNITQSTQSFNDFTRVVGGEDAKPGQFPWQVVLNGKVDAFCGGSIVNEKWIVTAAHCVETGVKITVVAGEHNIEETEHTEQKRNVIRIIPHHNYNAAINKYNHDIALLELDEPLVLNSYVTPICIADKEYTNIFLKFGSGYVSGWGRVFHKGRSALVLQYLRVPLVDRATCLRSTKFTIYNNMFCAGFHEGGRDSCQGDSGGPHVTEVEGTSFLTGIISWGEECAMKGKYGIYTKVSRYVNWIKEKTKLT

SEQ ID NO: 89 - protein, 415 aa, Homo sapiens
  Factor IX T159A
YNSGKLEEFVQGNLERECMEEKCSFEEAREVFENTERTTEFWKQYVDGDQCESNPCLNGGSCKDDINSYECWCPFGFEGKNCELDVTCNIKNGRCEQFCKNSADNKVVCSCTEGYRLAENQKSCEPAVPFPCGRVSVSQTSKLTRAETVFPDVDYVNSAEAETILDNITQSTQSFNDFTRVVGGEDAKPGQFPWQVVLNGKVDAFCGGSIVNEKWIVTAAHCVETGVKITVVAGEHNIEETEHTEQKRNVIRIIPHHNYNAAINKYNHDIALLELDEPLVLNSYVTPICIADKEYTNIFLKFGSGYVSGWGRVFHKGRSALVLQYLRVPLVDRATCLRSTKFTIYNNMFCAGFHEGGRDSCQGDSGGPHVTEVEGTSFLTGIISWGEECAMKGKYGIYTKVSRYVNWIKEKTKLT

SEQ ID NO: 90 - protein, 415 aa, Homo sapiens
  Factor IX T169A
YNSGKLEEFVQGNLERECMEEKCSFEEAREVFENTERTTEFWKQYVDGDQCESNPCLNGGSCKDDINSYECWCPFGFEGKNCELDVTCNIKNGRCEQFCKNSADNKVVCSCTEGYRLAENQKSCEPAVPFPCGRVSVSQTSKLTRAETVFPDVDYVNSTEAETILDNIAQSTQSFNDFTRVVGGEDAKPGQFPWQVVLNGKVDAFCGGSIVNEKWIVTAAHCVETGVKITVVAGEHNIEETEHTEQKRNVIRIIPHHNYNAAINKYNHDIALLELDEPLVLNSYVTPICIADKEYTNIFLKFGSGYVSGWGRVFHKGRSALVLQYLRVPLVDRATCLRSTKFTIYNNMFCAGFHEGGRDSCQGDSGGPHVTEVEGTSFLTGIISWGEECAMKGKYGIYTKVSRYVNWIKEKTKLT

SEQ ID NO: 91 - protein, 415 aa, Homo sapiens
  Factor IX T172A
YNSGKLEEFVQGNLERECMEEKCSFEEAREVFENTERTTEFWKQYVDGDQCESNPCLNGGSCKDDINSYECWCPFGFEGKNCELDVTCNIKNGRCEQFCKNSADNKVVCSCTEGYRLAENQKSCEPAVPFPCGRVSVSQTSKLTRAETVFPDVDYVNSTEAETILDNITQSAQSFNDFTRVVGGEDAKPGQFPWQVVLNGKVDAFCGGSIVNEKWIVTAAHCVETGVKITVVAGEHNIEETEHTEQKRNVIRIIPHHNYNAAINKYNHDIALLELDEPLVLNSYVTPICIADKEYTNIFLKFGSGYVSGWGRVFHKGRSALVLQYLRVPLVDRATCLRSTKFTIYNNMFCAGFHEGGRDSCQGDSGGPHVTEVEGTSFLTGIISWGEECAMKGKYGIYTKVSRYVNWIKEKTKLT

SEQ ID NO: 92 - protein, 415 aa, Homo sapiens
  Factor IX T179A
YNSGKLEEFVQGNLERECMEEKCSFEEAREVFENTERTTEFWKQYVDGDQCESNPCLNGGSCKDDINSYECWCPFGFEGKNCELDVTCNIKNGRCEQFCKNSADNKVVCSCTEGYRLAENQKSCEPAVPFPCGRVSVSQTSKLTRAETVFPDVDYVNSTEAETILDNITQSTQSFNDFARVVGGEDAKPGQFPWQVVLNGKVDAFCGGSIVNEKWIVTAAHCVETGVKITVVAGEHNIEETEHTEQKRNVIRIIPHHNYNAAINKYNHDIALLELDEPLVLNSYVTPICIADKEYTNIFLKFGSGYVSGWGRVFHKGRSALVLQYLRVPLVDRATCLRSTKFTIYNNMFCAGFHEGGRDSCQGDSGGPHVTEVEGTSFLTGIISWGEECAMKGKYGIYTKVSRYVNWIKEKTKLT

SEQ ID NO: 93 - protein, 415 aa, Homo sapiens
  Factor IX Y155H
YNSGKLEEFVQGNLERECMEEKCSFEEAREVFENTERTTEFWKQYVDGDQCESNPCLNGGSCKDDINSYECWCPFGFEGKNCELDVTCNIKNGRCEQFCKNSADNKVVCSCTEGYRLAENQKSCEPAVPFPCGRVSVSQTSKLTRAETVFPDVDHVNSTEAETILDNITQSTQSFNDFTRVVGGEDAKPGQFPWQVVLNGKVDAFCGGSIVNEKWIVTAAHCVETGVKITVVAGEHNIEETEHTEQKRNVIRIIPHHNYNAAINKYNHDIALLELDEPLVLNSYVTPICIADKEYTNIFLKFGSGYVSGWGRVFHKGRSALVLQYLRVPLVDRATCLRSTKFTIYNNMFCAGFHEGGRDSCQGDSGGPHVTEVEGTSFLTGIISWGEECAMKGKYGIYTKVSRYVNWIKEKTKLT

SEQ ID NO: 94 - protein, 415 aa, Homo sapiens
  Factor IX Y155Q
YNSGKLEEFVQGNLERECMEEKCSFEEAREVFENTERTTEFWKQYVDGDQCESNPCLNGGSCKDDINSYECWCPFGFEGKNCELDVTCNIKNGRCEQFCKNSADNKVVCSCTEGYRLAENQKSCEPAVPFPCGRVSVSQTSKLTRAETVFPDVDQVNSTEAETILDNITQSTQSFNDFTRVVGGEDAKPGQFPWQVVLNGKVDAFCGGSIVNEKWIVTAAHCVETGVKITVVAGEHNIEETEHTEQKRNVIRIIPHHNYNAAINKYNHDIALLELDEPLVLNSYVTPICIADKEYTNIFLKFGSGYVSGWGRVFHKGRSALVLQYLRVPLVDRATCLRSTKFTIYNNMFCAGFHEGGRDSCQGDSGGPHVTEVEGTSFLTGIISWGEECAMKGKYGIYTKVSRYVNWIKEKTKLT

SEQ ID NO: 95 - protein, 415 aa, Homo sapiens
  Factor IX S158A
YNSGKLEEFVQGNLERECMEEKCSFEEAREVFENTERTTEFWKQYVDGDQCESNPCLNGGSCKDDINSYECWCPFGFEGKNCELDVTCNIKNGRCEQFCKNSADNKVVCSCTEGYRLAENQKSCEPAVPFPCGRVSVSQTSKLTRAETVFPDVDYVNATEAETILDNITQSTQSFNDFTRVVGGEDAKPGQFPWQVVLNGKVDAFCGGSIVNEKWIVTAAHCVETGVKITVVAGEHNIEETEHTEQKRNVIRIIPHHNYNAAINKYNHDIALLELDEPLVLNSYVTPICIADKEYTNIFLKFGSGYVSGWGRVFHKGRSALVLQYLRVPLVDRATCLRSTKFTIYNNMFCAGFHEGGRDSCQGDSGGPHVTEVEGTSFLTGIISWGEECAMKGKYGIYTKVSRYVNWIKEKTKLT

SEQ ID NO: 96 - protein, 415 aa, Homo sapiens
  Factor IX S158D
YNSGKLEEFVQGNLERECMEEKCSFEEAREVFENTERTTEFWKQYVDGDQCESNPCLNGGSCKDDINSYECWCPFGFEGKNCELDVTCNIKNGRCEQFCKNSADNKVVCSCTEGYRLAENQKSCEPAVPFPCGRVSVSQTSKLTRAETVFPDVDYVNDTEAETILDNITQSTQSFNDFTRVVGGEDAKPGQFPWQVVLNGKVDAFCGGSIVNEKWIVTAAHCVETGVKITVVAGEHNIEETEHTEQKRNVIRIIPHHNYNAAINKYNHDIALLELDEPLVLNSYVTPICIADKEYTNIFLKFGSGYVSGWGRVFHKGRSALVLQYLRVPLVDRATCLRSTKFTIYNNMFCAGFHEGGRDSCQGDSGGPHVTEVEGTSFLTGIISWGEECAMKGKYGIYTKVSRYVNWIKEKTKLT

SEQ ID NO: 97 - protein, 415 aa, Homo sapiens
  Factor IX S158E
YNSGKLEEFVQGNLERECMEEKCSFEEAREVFENTERTTEFWKQYVDGDQCESNPCLNGGSCKDDINSYECWCPFGFEGKNCELDVTCNIKNGRCEQFCKNSADNKVVCSCTEGYRLAENQKSCEPAVPFPCGRVSVSQTSKLTRAETVFPDVDYVNETEAETILDNITQSTQSFNDFTRVVGGEDAKPGQFPWQVVLNGKVDAFCGGSIVNEKWIVTAAHCVETGVKITVVAGEHNIEETEHTEQKRNVIRIIPHHNYNAAINKYNHDIALLELDEPLVLNSYVTPICIADKEYTNIFLKFGSGYVSGWGRVFHKGRSALVLQYLRVPLVDRATCLRSTKFTIYNNMFCAGFHEGGRDSCQGDSGGPHVTEVEGTSFLTGIISWGEECAMKGKYGIYTKVSRYVNWIKEKTKLT

SEQ ID NO: 98 - protein, 415 aa, Homo sapiens
  Factor IX N157Q
YNSGKLEEFVQGNLERECMEEKCSFEEAREVFENTERTTEFWKQYVDGDQCESNPCLNGGSCKDDINSYECWCPFGFEGKNCELDVTCNIKNGRCEQFCKNSADNKVVCSCTEGYRLAENQKSCEPAVPFPCGRVSVSQTSKLTRAETVFPDVDYVQSTEAETILDNITQSTQSFNDFTRVVGGEDAKPGQFPWQVVLNGKVDAFCGGSIVNEKWIVTAAHCVETGVKITVVAGEHNIEETEHTEQKRNVIRIIPHHNYNAAINKYNHDIALLELDEPLVLNSYVTPICIADKEYTNIFLKFGSGYVSGWGRVFHKGRSALVLQYLRVPLVDRATCLRSTKFTIYNNMFCAGFHEGGRDSCQGDSGGPHVTEVEGTSFLTGIISWGEECAMKGKYGIYTKVSRYVNWIKEKTKLT

SEQ ID NO: 99 - protein, 415 aa, Homo sapiens
  Factor IX D203N/F205T
YNSGKLEEFVQGNLERECMEEKCSFEEAREVFENTERTTEFWKQYVDGDQCESNPCLNGGSCKDDINSYECWCPFGFEGKNCELDVTCNIKNGRCEQFCKNSADNKVVCSCTEGYRLAENQKSCEPAVPFPCGRVSVSQTSKLTRAETVFPDVDYVNSTEAETILDNITQSTQSFNDFTRVVGGEDAKPGQFPWQVVLNGKVNATCGGSIVNEKWIVTAAHCVETGVKITVVAGEHNIEETEHTEQKRNVIRIIPHHNYNAAINKYNHDIALLELDEPLVLNSYVTPICIADKEYTNIFLKFGSGYVSGWGRVFHKGRSALVLQYLRVPLVDRATCLRSTKFTIYNNMFCAGFHEGGRDSCQGDSGGPHVTEVEGTSFLTGIISWGEECAMKGKYGIYTKVSRYVNWIKEKTKLT

SEQ ID NO: 100 - protein, 415 aa, Homo sapiens
  Factor IX D85N/D203N/F205T
YNSGKLEEFVQGNLERECMEEKCSFEEAREVFENTERTTEFWKQYVDGDQCESNPCLNGGSCKDDINSYECWCPFGFEGKNCELNVTCNIKNGRCEQFCKNSADNKVVCSCTEGYRLAENQKSCEPAVPFPCGRVSVSQTSKLTRAETVFPDVDYVNSTEAETILDNITQSTQSFNDFTRVVGGEDAKPGQFPWQVVLNGKVNATCGGSIVNEKWIVTAAHCVETGVKITVVAGEHNIEETEHTEQKRNVIRIIPHHNYNAAINKYNHDIALLELDEPLVLNSYVTPICIADKEYTNIFLKFGSGYVSGWGRVFHKGRSALVLQYLRVPLVDRATCLRSTKFTIYNNMFCAGFHEGGRDSCQGDSGGPHVTEVEGTSFLTGIISWGEECAMKGKYGIYTKVSRYVNWIKEKTKLT

SEQ ID NO: 101 - protein, 415 aa, Homo sapiens
  Factor IX K228N
YNSGKLEEFVQGNLERECMEEKCSFEEAREVFENTERTTEFWKQYVDGDQCESNPCLNGGSCKDDINSYECWCPFGFEGKNCELDVTCNIKNGRCEQFCKNSADNKVVCSCTEGYRLAENQKSCEPAVPFPCGRVSVSQTSKLTRAETVFPDVDYVNSTEAETILDNITQSTQSFNDFTRVVGGEDAKPGQFPWQVVLNGKVDAFCGGSIVNEKWIVTAAHCVETGVNITVVAGEHNIEETEHTEQKRNVIRIIPHHNYNAAINKYNHDIALLELDEPLVLNSYVTPICIADKEYTNIFLKFGSGYVSGWGRVFHKGRSALVLQYLRVPLVDRATCLRSTKFTIYNNMFCAGFHEGGRDSCQGDSGGPHVTEVEGTSFLTGIISWGEECAMKGKYGIYTKVSRYVNWIKEKTKLT

SEQ ID NO: 102 - protein, 415 aa, Homo sapiens
  Factor IX D85N/K228N
YNSGKLEEFVQGNLERECMEEKCSFEEAREVFENTERTTEFWKQYVDGDQCESNPCLNGGSCKDDINSYECWCPFGFEGKNCELNVTCNIKNGRCEQFCKNSADNKVVCSCTEGYRLAENQKSCEPAVPFPCGRVSVSQTSKLTRAETVFPDVDYVNSTEAETILDNITQSTQSFNDFTRVVGGEDAKPGQFPWQVVLNGKVDAFCGGSIVNEKWIVTAAHCVETGVNITVVAGEHNIEETEHTEQKRNVIRIIPHHNYNAAINKYNHDIALLELDEPLVLNSYVTPICIADKEYTNIFLKFGSGYVSGWGRVFHKGRSALVLQYLRVPLVDRATCLRSTKFTIYNNMFCAGFHEGGRDSCQGDSGGPHVTEVEGTSFLTGIISWGEECAMKGKYGIYTKVSRYVNWIKEKTKLT

SEQ ID NO: 103 - protein, 415 aa, Homo sapiens
  Factor IX I251S
YNSGKLEEFVQGNLERECMEEKCSFEEAREVFENTERTTEFWKQYVDGDQCESNPCLNGGSCKDDINSYECWCPFGFEGKNCELDVTCNIKNGRCEQFCKNSADNKVVCSCTEGYRLAENQKSCEPAVPFPCGRVSVSQTSKLTRAETVFPDVDYVNSTEAETILDNITQSTQSFNDFTRVVGGEDAKPGQFPWQVVLNGKVDAFCGGSIVNEKWIVTAAHCVETGVKITVVAGEHNIEETEHTEQKRNVSRIIPHHNYNAAINKYNHDIALLELDEPLVLNSYVTPICIADKEYTNIFLKFGSGYVSGWGRVFHKGRSALVLQYLRVPLVDRATCLRSTKFTIYNNMFCAGFHEGGRDSCQGDSGGPHVTEVEGTSFLTGIISWGEECAMKGKYGIYTKVSRYVNWIKEKTKLT

SEQ ID NO: 104 - protein, 415 aa, Homo sapiens
  Factor IX D85N/I251S
YNSGKLEEFVQGNLERECMEEKCSFEEAREVFENTERTTEFWKQYVDGDQCESNPCLNGGSCKDDINSYECWCPFGFEGKNCELNVTCNIKNGRCEQFCKNSADNKVVCSCTEGYRLAENQKSCEPAVPFPCGRVSVSQTSKLTRAETVFPDVDYVNSTEAETILDNITQSTQSFNDFTRVVGGEDAKPGQFPWQVVLNGKVDAFCGGSIVNEKWIVTAAHCVETGVKITVVAGEHNIEETEHTEQKRNVSRIIPHHNYNAAINKYNHDIALLELDEPLVLNSYVTPICIADKEYTNIFLKFGSGYVSGWGRVFHKGRSALVLQYLRVPLVDRATCLRSTKFTIYNNMFCAGFHEGGRDSCQGDSGGPHVTEVEGTSFLTGIISWGEECAMKGKYGIYTKVSRYVNWIKEKTKLT

SEQ ID NO: 105 - protein, 415 aa, Homo sapiens
  Factor IX D85N/D104N/K106S/I251S
YNSGKLEEFVQGNLERECMEEKCSFEEAREVFENTERTTEFWKQYVDGDQCESNPCLNGGSCKDDINSYECWCPFGFEGKNCELNVTCNIKNGRCEQFCKNSANNSVVCSCTEGYRLAENQKSCEPAVPFPCGRVSVSQTSKLTRAETVFPDVDYVNSTEAETILDNITQSTQSFNDFTRVVGGEDAKPGQFPWQVVLNGKVDAFCGGSIVNEKWIVTAAHCVETGVKITVVAGEHNIEETEHTEQKRNVSRIIPHHNYNAAINKYNHDIALLELDEPLVLNSYVTPICIADKEYTNIFLKFGSGYVSGWGRVFHKGRSALVLQYLRVPLVDRATCLRSTKFTIYNNMFCAGFHEGGRDSCQGDSGGPHVTEVEGTSFLTGIISWGEECAMKGKYGIYTKVSRYVNWIKEKTKLT

SEQ ID NO: 106 - protein, 415 aa, Homo sapiens
  Factor IX A262S
YNSGKLEEFVQGNLERECMEEKCSFEEAREVFENTERTTEFWKQYVDGDQCESNPCLNGGSCKDDINSYECWCPFGFEGKNCELDVTCNIKNGRCEQFCKNSADNKVVCSCTEGYRLAENQKSCEPAVPFPCGRVSVSQTSKLTRAETVFPDVDYVNSTEAETILDNITQSTQSFNDFTRVVGGEDAKPGQFPWQVVLNGKVDAFCGGSIVNEKWIVTAAHCVETGVKITVVAGEHNIEETEHTEQKRNVIRIIPHHNYNASINKYNHDIALLELDEPLVLNSYVTPICIADKEYTNIFLKFGSGYVSGWGRVFHKGRSALVLQYLRVPLVDRATCLRSTKFTIYNNMFCAGFHEGGRDSCQGDSGGPHVTEVEGTSFLTGIISWGEECAMKGKYGIYTKVSRYVNWIKEKTKLT

SEQ ID NO: 107 - protein, 415 aa, Homo sapiens
  Factor IX K413N
YNSGKLEEFVQGNLERECMEEKCSFEEAREVFENTERTTEFWKQYVDGDQCESNPCLNGGSCKDDINSYECWCPFGFEGKNCELDVTCNIKNGRCEQFCKNSADNKVVCSCTEGYRLAENQKSCEPAVPFPCGRVSVSQTSKLTRAETVFPDVDYVNSTEAETILDNITQSTQSFNDFTRVVGGEDAKPGQFPWQVVLNGKVDAFCGGSIVNEKWIVTAAHCVETGVKITVVAGEHNIEETEHTEQKRNVIRIIPHHNYNAAINKYNHDIALLELDEPLVLNSYVTPICIADKEYTNIFLKFGSGYVSGWGRVFHKGRSALVLQYLRVPLVDRATCLRSTKFTIYNNMFCAGFHEGGRDSCQGDSGGPHVTEVEGTSFLTGIISWGEECAMKGKYGIYTKVSRYVNWIKEKTNLT

SEQ ID NO: 108 - protein, 415 aa, Homo sapiens
  Factor IX E410N
YNSGKLEEFVQGNLERECMEEKCSFEEAREVFENTERTTEFWKQYVDGDQCESNPCLNGGSCKDDINSYECWCPFGFEGKNCELDVTCNIKNGRCEQFCKNSADNKVVCSCTEGYRLAENQKSCEPAVPFPCGRVSVSQTSKLTRAETVFPDVDYVNSTEAETILDNITQSTQSFNDFTRVVGGEDAKPGQFPWQVVLNGKVDAFCGGSIVNEKWIVTAAHCVETGVKITVVAGEHNIEETEHTEQKRNVIRIIPHHNYNAAINKYNHDIALLELDEPLVLNSYVTPICIADKEYTNIFLKFGSGYVSGWGRVFHKGRSALVLQYLRVPLVDRATCLRSTKFTIYNNMFCAGFHEGGRDSCQGDSGGPHVTEVEGTSFLTGIISWGEECAMKGKYGIYTKVSRYVNWIKNKTKLT

SEQ ID NO: 109 - protein, 415 aa, Homo sapiens
  Factor IX E239N
YNSGKLEEFVQGNLERECMEEKCSFEEAREVFENTERTTEFWKQYVDGDQCESNPCLNGGSCKDDINSYECWCPFGFEGKNCELDVTCNIKNGRCEQFCKNSADNKVVCSCTEGYRLAENQKSCEPAVPFPCGRVSVSQTSKLTRAETVFPDVDYVNSTEAETILDNITQSTQSFNDFTRVVGGEDAKPGQFPWQVVLNGKVDAFCGGSIVNEKWIVTAAHCVETGVKITVVAGEHNINETEHTEQKRNVIRIIPHHNYNAAINKYNHDIALLELDEPLVLNSYVTPICIADKEYTNIFLKFGSGYVSGWGRVFHKGRSALVLQYLRVPLVDRATCLRSTKFTIYNNMFCAGFHEGGRDSCQGDSGGPHVTEVEGTSFLTGIISWGEECAMKGKYGIYTKVSRYVNWIKEKTKLT

SEQ ID NO: 110 - protein, 415 aa, Homo sapiens
  Factor IX T241N/H243S
YNSGKLEEFVQGNLERECMEEKCSFEEAREVFENTERTTEFWKQYVDGDQCESNPCLNGGSCKDDINSYECWCPFGFEGKNCELDVTCNIKNGRCEQFCKNSADNKVVCSCTEGYRLAENQKSCEPAVPFPCGRVSVSQTSKLTRAETVFPDVDYVNSTEAETILDNITQSTQSFNDFTRVVGGEDAKPGQFPWQVVLNGKVDAFCGGSIVNEKWIVTAAHCVETGVKITVVAGEHNIEENESTEQKRNVIRIIPHHNYNAAINKYNHDIALLELDEPLVLNSYVTPICIADKEYTNIFLKFGSGYVSGWGRVFHKGRSALVLQYLRVPLVDRATCLRSTKFTIYNNMFCAGFHEGGRDSCQGDSGGPHVTEVEGTSFLTGIISWGEECAMKGKYGIYTKVSRYVNWIKEKTKLT

SEQ ID NO: 111 - protein, 415 aa, Homo sapiens
  Factor IX K247N/N249S
YNSGKLEEFVQGNLERECMEEKCSFEEAREVFENTERTTEFWKQYVDGDQCESNPCLNGGSCKDDINSYECWCPFGFEGKNCELDVTCNIKNGRCEQFCKNSADNKVVCSCTEGYRLAENQKSCEPAVPFPCGRVSVSQTSKLTRAETVFPDVDYVNSTEAETILDNITQSTQSFNDFTRVVGGEDAKPGQFPWQVVLNGKVDAFCGGSIVNEKWIVTAAHCVETGVKITVVAGEHNIEETEHTEQNRSVIRIIPHHNYNAAINKYNHDIALLELDEPLVLNSYVTPICIADKEYTNIFLKFGSGYVSGWGRVFHKGRSALVLQYLRVPLVDRATCLRSTKFTIYNNMFCAGFHEGGRDSCQGDSGGPHVTEVEGTSFLTGIISWGEECAMKGKYGIYTKVSRYVNWIKEKTKLT

SEQ ID NO: 112 - protein, 415 aa, Homo sapiens
  Factor IX L321N
YNSGKLEEFVQGNLERECMEEKCSFEEAREVFENTERTTEFWKQYVDGDQCESNPCLNGGSCKDDINSYECWCPFGFEGKNCELDVTCNIKNGRCEQFCKNSADNKVVCSCTEGYRLAENQKSCEPAVPFPCGRVSVSQTSKLTRAETVFPDVDYVNSTEAETILDNITQSTQSFNDFTRVVGGEDAKPGQFPWQVVLNGKVDAFCGGSIVNEKWIVTAAHCVETGVKITVVAGEHNIEETEHTEQKRNVIRIIPHHNYNAAINKYNHDIALLELDEPLVLNSYVTPICIADKEYTNIFLKFGSGYVSGWGRVFHKGRSANVLQYLRVPLVDRATCLRSTKFTIYNNMFCAGFHEGGRDSCQGDSGGPHVTEVEGTSFLTGIISWGEECAMKGKYGIYTKVSRYVNWIKEKTKLT

SEQ ID NO: 113 - protein, 415 aa, Homo sapiens
  Factor IX F314N/H315S
YNSGKLEEFVQGNLERECMEEKCSFEEAREVFENTERTTEFWKQYVDGDQCESNPCLNGGSCKDDINSYECWCPFGFEGKNCELDVTCNIKNGRCEQFCKNSADNKVVCSCTEGYRLAENQKSCEPAVPFPCGRVSVSQTSKLTRAETVFPDVDYVNSTEAETILDNITQSTQSFNDFTRVVGGEDAKPGQFPWQVVLNGKVDAFCGGSIVNEKWIVTAAHCVETGVKITVVAGEHNIEETEHTEQKRNVIRIIPHHNYNAAINKYNHDIALLELDEPLVLNSYVTPICIADKEYTNIFLKFGSGYVSGWGRVNSKGRSALVLQYLRVPLVDRATCLRSTKFTIYNNMFCAGFHEGGRDSCQGDSGGPHVTEVEGTSFLTGIISWGEECAMKGKYGIYTKVSRYVNWIKEKTKLT

SEQ ID NO: 114 - protein, 415 aa, Homo sapiens
  Factor IX K392N/K394S
YNSGKLEEFVQGNLERECMEEKCSFEEAREVFENTERTTEFWKQYVDGDQCESNPCLNGGSCKDDINSYECWCPFGFEGKNCELDVTCNIKNGRCEQFCKNSADNKVVCSCTEGYRLAENQKSCEPAVPFPCGRVSVSQTSKLTRAETVFPDVDYVNSTEAETILDNITQSTQSFNDFTRVVGGEDAKPGQFPWQVVLNGKVDAFCGGSIVNEKWIVTAAHCVETGVKITVVAGEHNIEETEHTEQKRNVIRIIPHHNYNAAINKYNHDIALLELDEPLVLNSYVTPICIADKEYTNIFLKFGSGYVSGWGRVFHKGRSALVLQYLRVPLVDRATCLRSTKFTIYNNMFCAGFHEGGRDSCQGDSGGPHVTEVEGTSFLTGIISWGEECAMNGSYGIYTKVSRYVNWIKEKTKLT

SEQ ID NO: 115 - protein, 415 aa, Homo sapiens
  Factor IX S319N/L321S
YNSGKLEEFVQGNLERECMEEKCSFEEAREVFENTERTTEFWKQYVDGDQCESNPCLNGGSCKDDINSYECWCPFGFEGKNCELDVTCNIKNGRCEQFCKNSADNKVVCSCTEGYRLAENQKSCEPAVPFPCGRVSVSQTSKLTRAETVFPDVDYVNSTEAETILDNITQSTQSFNDFTRVVGGEDAKPGQFPWQVVLNGKVDAFCGGSIVNEKWIVTAAHCVETGVKITVVAGEHNIEETEHTEQKRNVIRIIPHHNYNAAINKYNHDIALLELDEPLVLNSYVTPICIADKEYTNIFLKFGSGYVSGWGRVFHKGRNASVLQYLRVPLVDRATCLRSTKFTIYNNMFCAGFHEGGRDSCQGDSGGPHVTEVEGTSFLTGIISWGEECAMKGKYGIYTKVSRYVNWIKEKTKLT

SEQ ID NO: 116 - protein, 415 aa, Homo sapiens
  Factor IX N260S
YNSGKLEEFVQGNLERECMEEKCSFEEAREVFENTERTTEFWKQYVDGDQCESNPCLNGGSCKDDINSYECWCPFGFEGKNCELDVTCNIKNGRCEQFCKNSADNKVVCSCTEGYRLAENQKSCEPAVPFPCGRVSVSQTSKLTRAETVFPDVDYVNSTEAETILDNITQSTQSFNDFTRVVGGEDAKPGQFPWQVVLNGKVDAFCGGSIVNEKWIVTAAHCVETGVKITVVAGEHNIEETEHTEQKRNVIRIIPHHNYSAAINKYNHDIALLELDEPLVLNSYVTPICIADKEYTNIFLKFGSGYVSGWGRVFHKGRSALVLQYLRVPLVDRATCLRSTKFTIYNNMFCAGFHEGGRDSCQGDSGGPHVTEVEGTSFLTGIISWGEECAMKGKYGIYTKVSRYVNWIKEKTKLT

SEQ ID NO: 117 - protein, 415 aa, Homo sapiens
  Factor IX Y284N
YNSGKLEEFVQGNLERECMEEKCSFEEAREVFENTERTTEFWKQYVDGDQCESNPCLNGGSCKDDINSYECWCPFGFEGKNCELDVTCNIKNGRCEQFCKNSADNKVVCSCTEGYRLAENQKSCEPAVPFPCGRVSVSQTSKLTRAETVFPDVDYVNSTEAETILDNITQSTQSFNDFTRVVGGEDAKPGQFPWQVVLNGKVDAFCGGSIVNEKWIVTAAHCVETGVKITVVAGEHNIEETEHTEQKRNVIRIIPHHNYNAAINKYNHDIALLELDEPLVLNSNVTPICIADKEYTNIFLKFGSGYVSGWGRVFHKGRSALVLQYLRVPLVDRATCLRSTKFTIYNNMFCAGFHEGGRDSCQGDSGGPHVTEVEGTSFLTGIISWGEECAMKGKYGIYTKVSRYVNWIKEKTKLT

SEQ ID NO: 118 - protein, 415 aa, Homo sapiens
  Factor IX G317N
YNSGKLEEFVQGNLERECMEEKCSFEEAREVFENTERTTEFWKQYVDGDQCESNPCLNGGSCKDDINSYECWCPFGFEGKNCELDVTCNIKNGRCEQFCKNSADNKVVCSCTEGYRLAENQKSCEPAVPFPCGRVSVSQTSKLTRAETVFPDVDYVNSTEAETILDNITQSTQSFNDFTRVVGGEDAKPGQFPWQVVLNGKVDAFCGGSIVNEKWIVTAAHCVETGVKITVVAGEHNIEETEHTEQKRNVIRIIPHHNYNAAINKYNHDIALLELDEPLVLNSYVTPICIADKEYTNIFLKFGSGYVSGWGRVFHKNRSALVLQYLRVPLVDRATCLRSTKFTIYNNMFCAGFHEGGRDSCQGDSGGPHVTEVEGTSFLTGIISWGEECAMKGKYGIYTKVSRYVNWIKEKTKLT

SEQ ID NO: 119 - protein, 415 aa, Homo sapiens
  Factor IX R318N/A320S
YNSGKLEEFVQGNLERECMEEKCSFEEAREVFENTERTTEFWKQYVDGDQCESNPCLNGGSCKDDINSYECWCPFGFEGKNCELDVTCNIKNGRCEQFCKNSADNKVVCSCTEGYRLAENQKSCEPAVPFPCGRVSVSQTSKLTRAETVFPDVDYVNSTEAETILDNITQSTQSFNDFTRVVGGEDAKPGQFPWQVVLNGKVDAFCGGSIVNEKWIVTAAHCVETGVKITVVAGEHNIEETEHTEQKRNVIRIIPHHNYNAAINKYNHDIALLELDEPLVLNSYVTPICIADKEYTNIFLKFGSGYVSGWGRVFHKGNSSLVLQYLRVPLVDRATCLRSTKFTIYNNMFCAGFHEGGRDSCQGDSGGPHVTEVEGTSFLTGIISWGEECAMKGKYGIYTKVSRYVNWIKEKTKLT

SEQ ID NO: 120 - protein, 415 aa, Homo sapiens
  Factor IX R318A
YNSGKLEEFVQGNLERECMEEKCSFEEAREVFENTERTTEFWKQYVDGDQCESNPCLNGGSCKDDINSYECWCPFGFEGKNCELDVTCNIKNGRCEQFCKNSADNKVVCSCTEGYRLAENQKSCEPAVPFPCGRVSVSQTSKLTRAETVFPDVDYVNSTEAETILDNITQSTQSFNDFTRVVGGEDAKPGQFPWQVVLNGKVDAFCGGSIVNEKWIVTAAHCVETGVKITVVAGEHNIEETEHTEQKRNVIRIIPHHNYNAAINKYNHDIALLELDEPLVLNSYVTPICIADKEYTNIFLKFGSGYVSGWGRVFHKGASALVLQYLRVPLVDRATCLRSTKFTIYNNMFCAGFHEGGRDSCQGDSGGPHVTEVEGTSFLTGIISWGEECAMKGKYGIYTKVSRYVNWIKEKTKLT

SEQ ID NO: 121 - protein, 415 aa, Homo sapiens
  Factor IX R318E
YNSGKLEEFVQGNLERECMEEKCSFEEAREVFENTERTTEFWKQYVDGDQCESNPCLNGGSCKDDINSYECWCPFGFEGKNCELDVTCNIKNGRCEQFCKNSADNKVVCSCTEGYRLAENQKSCEPAVPFPCGRVSVSQTSKLTRAETVFPDVDYVNSTEAETILDNITQSTQSFNDFTRVVGGEDAKPGQFPWQVVLNGKVDAFCGGSIVNEKWIVTAAHCVETGVKITVVAGEHNIEETEHTEQKRNVIRIIPHHNYNAAINKYNHDIALLELDEPLVLNSYVTPICIADKEYTNIFLKFGSGYVSGWGRVFHKGESALVLQYLRVPLVDRATCLRSTKFTIYNNMFCAGFHEGGRDSCQGDSGGPHVTEVEGTSFLTGIISWGEECAMKGKYGIYTKVSRYVNWIKEKTKLT

SEQ ID NO: 122 - protein, 415 aa, Homo sapiens
  Factor IX R318Y
YNSGKLEEFVQGNLERECMEEKCSFEEAREVFENTERTTEFWKQYVDGDQCESNPCLNGGSCKDDINSYECWCPFGFEGKNCELDVTCNIKNGRCEQFCKNSADNKVVCSCTEGYRLAENQKSCEPAVPFPCGRVSVSQTSKLTRAETVFPDVDYVNSTEAETILDNITQSTQSFNDFTRVVGGEDAKPGQFPWQVVLNGKVDAFCGGSIVNEKWIVTAAHCVETGVKITVVAGEHNIEETEHTEQKRNVIRIIPHHNYNAAINKYNHDIALLELDEPLVLNSYVTPICIADKEYTNIFLKFGSGYVSGWGRVFHKGYSALVLQYLRVPLVDRATCLRSTKFTIYNNMFCAGFHEGGRDSCQGDSGGPHVTEVEGTSFLTGIISWGEECAMKGKYGIYTKVSRYVNWIKEKTKLT

SEQ ID NO: 123 - protein, 415 aa, Homo sapiens
  Factor IX R312Q
YNSGKLEEFVQGNLERECMEEKCSFEEAREVFENTERTTEFWKQYVDGDQCESNPCLNGGSCKDDINSYECWCPFGFEGKNCELDVTCNIKNGRCEQFCKNSADNKVVCSCTEGYRLAENQKSCEPAVPFPCGRVSVSQTSKLTRAETVFPDVDYVNSTEAETILDNITQSTQSFNDFTRVVGGEDAKPGQFPWQVVLNGKVDAFCGGSIVNEKWIVTAAHCVETGVKITVVAGEHNIEETEHTEQKRNVIRIIPHHNYNAAINKYNHDIALLELDEPLVLNSYVTPICIADKEYTNIFLKFGSGYVSGWGQVFHKGRSALVLQYLRVPLVDRATCLRSTKFTIYNNMFCAGFHEGGRDSCQGDSGGPHVTEVEGTSFLTGIISWGEECAMKGKYGIYTKVSRYVNWIKEKTKLT

SEQ ID NO: 124 - protein, 415 aa, Homo sapiens
  Factor IX R312A
YNSGKLEEFVQGNLERECMEEKCSFEEAREVFENTERTTEFWKQYVDGDQCESNPCLNGGSCKDDINSYECWCPFGFEGKNCELDVTCNIKNGRCEQFCKNSADNKVVCSCTEGYRLAENQKSCEPAVPFPCGRVSVSQTSKLTRAETVFPDVDYVNSTEAETILDNITQSTQSFNDFTRVVGGEDAKPGQFPWQVVLNGKVDAFCGGSIVNEKWIVTAAHCVETGVKITVVAGEHNIEETEHTEQKRNVIRIIPHHNYNAAINKYNHDIALLELDEPLVLNSYVTPICIADKEYTNIFLKFGSGYVSGWGAVFHKGRSALVLQYLRVPLVDRATCLRSTKFTIYNNMFCAGFHEGGRDSCQGDSGGPHVTEVEGTSFLTGIISWGEECAMKGKYGIYTKVSRYVNWIKEKTKLT

SEQ ID NO: 125 - protein, 415 aa, Homo sapiens
  Factor IX R312Y
YNSGKLEEFVQGNLERECMEEKCSFEEAREVFENTERTTEFWKQYVDGDQCESNPCLNGGSCKDDINSYECWCPFGFEGKNCELDVTCNIKNGRCEQFCKNSADNKVVCSCTEGYRLAENQKSCEPAVPFPCGRVSVSQTSKLTRAETVFPDVDYVNSTEAETILDNITQSTQSFNDFTRVVGGEDAKPGQFPWQVVLNGKVDAFCGGSIVNEKWIVTAAHCVETGVKITVVAGEHNIEETEHTEQKRNVIRIIPHHNYNAAINKYNHDIALLELDEPLVLNSYVTPICIADKEYTNIFLKFGSGYVSGWGYVFHKGRSALVLQYLRVPLVDRATCLRSTKFTIYNNMFCAGFHEGGRDSCQGDSGGPHVTEVEGTSFLTGIISWGEECAMKGKYGIYTKVSRYVNWIKEKTKLT

SEQ ID NO: 126 - protein, 415 aa, Homo sapiens
  Factor IX R312L
YNSGKLEEFVQGNLERECMEEKCSFEEAREVFENTERTTEFWKQYVDGDQCESNPCLNGGSCKDDINSYECWCPFGFEGKNCELDVTCNIKNGRCEQFCKNSADNKVVCSCTEGYRLAENQKSCEPAVPFPCGRVSVSQTSKLTRAETVFPDVDYVNSTEAETILDNITQSTQSFNDFTRVVGGEDAKPGQFPWQVVLNGKVDAFCGGSIVNEKWIVTAAHCVETGVKITVVAGEHNIEETEHTEQKRNVIRIIPHHNYNAAINKYNHDIALLELDEPLVLNSYVTPICIADKEYTNIFLKFGSGYVSGWGLVFHKGRSALVLQYLRVPLVDRATCLRSTKFTIYNNMFCAGFHEGGRDSCQGDSGGPHVTEVEGTSFLTGIISWGEECAMKGKYGIYTKVSRYVNWIKEKTKLT

SEQ ID NO: 127 - protein, 415 aa, Homo sapiens
  Factor IX V202M
YNSGKLEEFVQGNLERECMEEKCSFEEAREVFENTERTTEFWKQYVDGDQCESNPCLNGGSCKDDINSYECWCPFGFEGKNCELDVTCNIKNGRCEQFCKNSADNKVVCSCTEGYRLAENQKSCEPAVPFPCGRVSVSQTSKLTRAETVFPDVDYVNSTEAETILDNITQSTQSFNDFTRVVGGEDAKPGQFPWQVVLNGKMDAFCGGSIVNEKWIVTAAHCVETGVKITVVAGEHNIEETEHTEQKRNVIRIIPHHNYNAAINKYNHDIALLELDEPLVLNSYVTPICIADKEYTNIFLKFGSGYVSGWGRVFHKGRSALVLQYLRVPLVDRATCLRSTKFTIYNNMFCAGFHEGGRDSCQGDSGGPHVTEVEGTSFLTGIISWGEECAMKGKYGIYTKVSRYVNWIKEKTKLT

SEQ ID NO: 128 - protein, 415 aa, Homo sapiens
  Factor IX V202Y
YNSGKLEEFVQGNLERECMEEKCSFEEAREVFENTERTTEFWKQYVDGDQCESNPCLNGGSCKDDINSYECWCPFGFEGKNCELDVTCNIKNGRCEQFCKNSADNKVVCSCTEGYRLAENQKSCEPAVPFPCGRVSVSQTSKLTRAETVFPDVDYVNSTEAETILDNITQSTQSFNDFTRVVGGEDAKPGQFPWQVVLNGKYDAFCGGSIVNEKWIVTAAHCVETGVKITVVAGEHNIEETEHTEQKRNVIRIIPHHNYNAAINKYNHDIALLELDEPLVLNSYVTPICIADKEYTNIFLKFGSGYVSGWGRVFHKGRSALVLQYLRVPLVDRATCLRSTKFTIYNNMFCAGFHEGGRDSCQGDSGGPHVTEVEGTSFLTGIISWGEECAMKGKYGIYTKVSRYVNWIKEKTKLT

SEQ ID NO: 129 - protein, 415 aa, Homo sapiens
  Factor IX D203M
YNSGKLEEFVQGNLERECMEEKCSFEEAREVFENTERTTEFWKQYVDGDQCESNPCLNGGSCKDDINSYECWCPFGFEGKNCELDVTCNIKNGRCEQFCKNSADNKVVCSCTEGYRLAENQKSCEPAVPFPCGRVSVSQTSKLTRAETVFPDVDYVNSTEAETILDNITQSTQSFNDFTRVVGGEDAKPGQFPWQVVLNGKVMAFCGGSIVNEKWIVTAAHCVETGVKITVVAGEHNIEETEHTEQKRNVIRIIPHHNYNAAINKYNHDIALLELDEPLVLNSYVTPICIADKEYTNIFLKFGSGYVSGWGRVFHKGRSALVLQYLRVPLVDRATCLRSTKFTIYNNMFCAGFHEGGRDSCQGDSGGPHVTEVEGTSFLTGIISWGEECAMKGKYGIYTKVSRYVNWIKEKTKLT

SEQ ID NO: 130 - protein, 415 aa, Homo sapiens
  Factor IX D203Y
YNSGKLEEFVQGNLERECMEEKCSFEEAREVFENTERTTEFWKQYVDGDQCESNPCLNGGSCKDDINSYECWCPFGFEGKNCELDVTCNIKNGRCEQFCKNSADNKVVCSCTEGYRLAENQKSCEPAVPFPCGRVSVSQTSKLTRAETVFPDVDYVNSTEAETILDNITQSTQSFNDFTRVVGGEDAKPGQFPWQVVLNGKVYAFCGGSIVNEKWIVTAAHCVETGVKITVVAGEHNIEETEHTEQKRNVIRIIPHHNYNAAINKYNHDIALLELDEPLVLNSYVTPICIADKEYTNIFLKFGSGYVSGWGRVFHKGRSALVLQYLRVPLVDRATCLRSTKFTIYNNMFCAGFHEGGRDSCQGDSGGPHVTEVEGTSFLTGIISWGEECAMKGKYGIYTKVSRYVNWIKEKTKLT

SEQ ID NO: 131 - protein, 415 aa, Homo sapiens
  Factor IX A204M
YNSGKLEEFVQGNLERECMEEKCSFEEAREVFENTERTTEFWKQYVDGDQCESNPCLNGGSCKDDINSYECWCPFGFEGKNCELDVTCNIKNGRCEQFCKNSADNKVVCSCTEGYRLAENQKSCEPAVPFPCGRVSVSQTSKLTRAETVFPDVDYVNSTEAETILDNITQSTQSFNDFTRVVGGEDAKPGQFPWQVVLNGKVDMFCGGSIVNEKWIVTAAHCVETGVKITVVAGEHNIEETEHTEQKRNVIRIIPHHNYNAAINKYNHDIALLELDEPLVLNSYVTPICIADKEYTNIFLKFGSGYVSGWGRVFHKGRSALVLQYLRVPLVDRATCLRSTKFTIYNNMFCAGFHEGGRDSCQGDSGGPHVTEVEGTSFLTGIISWGEECAMKGKYGIYTKVSRYVNWIKEKTKLT

SEQ ID NO: 132 - protein, 415 aa, Homo sapiens
  Factor IX A204Y
YNSGKLEEFVQGNLERECMEEKCSFEEAREVFENTERTTEFWKQYVDGDQCESNPCLNGGSCKDDINSYECWCPFGFEGKNCELDVTCNIKNGRCEQFCKNSADNKVVCSCTEGYRLAENQKSCEPAVPFPCGRVSVSQTSKLTRAETVFPDVDYVNSTEAETILDNITQSTQSFNDFTRVVGGEDAKPGQFPWQVVLNGKVDYFCGGSIVNEKWIVTAAHCVETGVKITVVAGEHNIEETEHTEQKRNVIRIIPHHNYNAAINKYNHDIALLELDEPLVLNSYVTPICIADKEYTNIFLKFGSGYVSGWGRVFHKGRSALVLQYLRVPLVDRATCLRSTKFTIYNNMFCAGFHEGGRDSCQGDSGGPHVTEVEGTSFLTGIISWGEECAMKGKYGIYTKVSRYVNWIKEKTKLT

SEQ ID NO: 133 - protein, 415 aa, Homo sapiens
  Factor IX K400A/R403A
YNSGKLEEFVQGNLERECMEEKCSFEEAREVFENTERTTEFWKQYVDGDQCESNPCLNGGSCKDDINSYECWCPFGFEGKNCELDVTCNIKNGRCEQFCKNSADNKVVCSCTEGYRLAENQKSCEPAVPFPCGRVSVSQTSKLTRAETVFPDVDYVNSTEAETILDNITQSTQSFNDFTRVVGGEDAKPGQFPWQVVLNGKVDAFCGGSIVNEKWIVTAAHCVETGVKITVVAGEHNIEETEHTEQKRNVIRIIPHHNYNAAINKYNHDIALLELDEPLVLNSYVTPICIADKEYTNIFLKFGSGYVSGWGRVFHKGRSALVLQYLRVPLVDRATCLRSTKFTIYNNMFCAGFHEGGRDSCQGDSGGPHVTEVEGTSFLTGIISWGEECAMKGKYGIYTAVSAYVNWIKEKTKLT

SEQ ID NO: 134 - protein, 415 aa, Homo sapiens
  Factor IX K400E/R403E
YNSGKLEEFVQGNLERECMEEKCSFEEAREVFENTERTTEFWKQYVDGDQCESNPCLNGGSCKDDINSYECWCPFGFEGKNCELDVTCNIKNGRCEQFCKNSADNKVVCSCTEGYRLAENQKSCEPAVPFPCGRVSVSQTSKLTRAETVFPDVDYVNSTEAETILDNITQSTQSFNDFTRVVGGEDAKPGQFPWQVVLNGKVDAFCGGSIVNEKWIVTAAHCVETGVKITVVAGEHNIEETEHTEQKRNVIRIIPHHNYNAAINKYNHDIALLELDEPLVLNSYVTPICIADKEYTNIFLKFGSGYVSGWGRVFHKGRSALVLQYLRVPLVDRATCLRSTKFTIYNNMFCAGFHEGGRDSCQGDSGGPHVTEVEGTSFLTGIISWGEECAMKGKYGIYTEVSEYVNWIKEKTKLT

SEQ ID NO: 135 - protein, 415 aa, Homo sapiens
  Factor IX R403A
YNSGKLEEFVQGNLERECMEEKCSFEEAREVFENTERTTEFWKQYVDGDQCESNPCLNGGSCKDDINSYECWCPFGFEGKNCELDVTCNIKNGRCEQFCKNSADNKVVCSCTEGYRLAENQKSCEPAVPFPCGRVSVSQTSKLTRAETVFPDVDYVNSTEAETILDNITQSTQSFNDFTRVVGGEDAKPGQFPWQVVLNGKVDAFCGGSIVNEKWIVTAAHCVETGVKITVVAGEHNIEETEHTEQKRNVIRIIPHHNYNAAINKYNHDIALLELDEPLVLNSYVTPICIADKEYTNIFLKFGSGYVSGWGRVFHKGRSALVLQYLRVPLVDRATCLRSTKFTIYNNMFCAGFHEGGRDSCQGDSGGPHVTEVEGTSFLTGIISWGEECAMKGKYGIYTKVSAYVNWIKEKTKLT

SEQ ID NO: 136 - protein, 415 aa, Homo sapiens
  Factor IX R403E
YNSGKLEEFVQGNLERECMEEKCSFEEAREVFENTERTTEFWKQYVDGDQCESNPCLNGGSCKDDINSYECWCPFGFEGKNCELDVTCNIKNGRCEQFCKNSADNKVVCSCTEGYRLAENQKSCEPAVPFPCGRVSVSQTSKLTRAETVFPDVDYVNSTEAETILDNITQSTQSFNDFTRVVGGEDAKPGQFPWQVVLNGKVDAFCGGSIVNEKWIVTAAHCVETGVKITVVAGEHNIEETEHTEQKRNVIRIIPHHNYNAAINKYNHDIALLELDEPLVLNSYVTPICIADKEYTNIFLKFGSGYVSGWGRVFHKGRSALVLQYLRVPLVDRATCLRSTKFTIYNNMFCAGFHEGGRDSCQGDSGGPHVTEVEGTSFLTGIISWGEECAMKGKYGIYTKVSEYVNWIKEKTKLT

SEQ ID NO: 137 - protein, 415 aa, Homo sapiens
  Factor IX K400A
YNSGKLEEFVQGNLERECMEEKCSFEEAREVFENTERTTEFWKQYVDGDQCESNPCLNGGSCKDDINSYECWCPFGFEGKNCELDVTCNIKNGRCEQFCKNSADNKVVCSCTEGYRLAENQKSCEPAVPFPCGRVSVSQTSKLTRAETVFPDVDYVNSTEAETILDNITQSTQSFNDFTRVVGGEDAKPGQFPWQVVLNGKVDAFCGGSIVNEKWIVTAAHCVETGVKITVVAGEHNIEETEHTEQKRNVIRIIPHHNYNAAINKYNHDIALLELDEPLVLNSYVTPICIADKEYTNIFLKFGSGYVSGWGRVFHKGRSALVLQYLRVPLVDRATCLRSTKFTIYNNMFCAGFHEGGRDSCQGDSGGPHVTEVEGTSFLTGIISWGEECAMKGKYGIYTAVSRYVNWIKEKTKLT

SEQ ID NO: 138 - protein, 415 aa, Homo sapiens
  Factor IX K400E
YNSGKLEEFVQGNLERECMEEKCSFEEAREVFENTERTTEFWKQYVDGDQCESNPCLNGGSCKDDINSYECWCPFGFEGKNCELDVTCNIKNGRCEQFCKNSADNKVVCSCTEGYRLAENQKSCEPAVPFPCGRVSVSQTSKLTRAETVFPDVDYVNSTEAETILDNITQSTQSFNDFTRVVGGEDAKPGQFPWQVVLNGKVDAFCGGSIVNEKWIVTAAHCVETGVKITVVAGEHNIEETEHTEQKRNVIRIIPHHNYNAAINKYNHDIALLELDEPLVLNSYVTPICIADKEYTNIFLKFGSGYVSGWGRVFHKGRSALVLQYLRVPLVDRATCLRSTKFTIYNNMFCAGFHEGGRDSCQGDSGGPHVTEVEGTSFLTGIISWGEECAMKGKYGIYTEVSRYVNWIKEKTKLT

SEQ ID NO: 139 - protein, 415 aa, Homo sapiens
  Factor IX K293E
YNSGKLEEFVQGNLERECMEEKCSFEEAREVFENTERTTEFWKQYVDGDQCESNPCLNGGSCKDDINSYECWCPFGFEGKNCELDVTCNIKNGRCEQFCKNSADNKVVCSCTEGYRLAENQKSCEPAVPFPCGRVSVSQTSKLTRAETVFPDVDYVNSTEAETILDNITQSTQSFNDFTRVVGGEDAKPGQFPWQVVLNGKVDAFCGGSIVNEKWIVTAAHCVETGVKITVVAGEHNIEETEHTEQKRNVIRIIPHHNYNAAINKYNHDIALLELDEPLVLNSYVTPICIADEEYTNIFLKFGSGYVSGWGRVFHKGRSALVLQYLRVPLVDRATCLRSTKFTIYNNMFCAGFHEGGRDSCQGDSGGPHVTEVEGTSFLTGIISWGEECAMKGKYGIYTKVSRYVNWIKEKTKLT

SEQ ID NO: 140 - protein, 415 aa, Homo sapiens
  Factor IX K293A
YNSGKLEEFVQGNLERECMEEKCSFEEAREVFENTERTTEFWKQYVDGDQCESNPCLNGGSCKDDINSYECWCPFGFEGKNCELDVTCNIKNGRCEQFCKNSADNKVVCSCTEGYRLAENQKSCEPAVPFPCGRVSVSQTSKLTRAETVFPDVDYVNSTEAETILDNITQSTQSFNDFTRVVGGEDAKPGQFPWQVVLNGKVDAFCGGSIVNEKWIVTAAHCVETGVKITVVAGEHNIEETEHTEQKRNVIRIIPHHNYNAAINKYNHDIALLELDEPLVLNSYVTPICIADAEYTNIFLKFGSGYVSGWGRVFHKGRSALVLQYLRVPLVDRATCLRSTKFTIYNNMFCAGFHEGGRDSCQGDSGGPHVTEVEGTSFLTGIISWGEECAMKGKYGIYTKVSRYVNWIKEKTKLT

SEQ ID NO: 141 - protein, 415 aa, Homo sapiens
  Factor IX R333A
YNSGKLEEFVQGNLERECMEEKCSFEEAREVFENTERTTEFWKQYVDGDQCESNPCLNGGSCKDDINSYECWCPFGFEGKNCELDVTCNIKNGRCEQFCKNSADNKVVCSCTEGYRLAENQKSCEPAVPFPCGRVSVSQTSKLTRAETVFPDVDYVNSTEAETILDNITQSTQSFNDFTRVVGGEDAKPGQFPWQVVLNGKVDAFCGGSIVNEKWIVTAAHCVETGVKITVVAGEHNIEETEHTEQKRNVIRIIPHHNYNAAINKYNHDIALLELDEPLVLNSYVTPICIADKEYTNIFLKFGSGYVSGWGRVFHKGRSALVLQYLRVPLVDAATCLRSTKFTIYNNMFCAGFHEGGRDSCQGDSGGPHVTEVEGTSFLTGIISWGEECAMKGKYGIYTKVSRYVNWIKEKTKLT

SEQ ID NO: 142 - protein, 415 aa, Homo sapiens
  Factor IX R333E
YNSGKLEEFVQGNLERECMEEKCSFEEAREVFENTERTTEFWKQYVDGDQCESNPCLNGGSCKDDINSYECWCPFGFEGKNCELDVTCNIKNGRCEQFCKNSADNKVVCSCTEGYRLAENQKSCEPAVPFPCGRVSVSQTSKLTRAETVFPDVDYVNSTEAETILDNITQSTQSFNDFTRVVGGEDAKPGQFPWQVVLNGKVDAFCGGSIVNEKWIVTAAHCVETGVKITVVAGEHNIEETEHTEQKRNVIRIIPHHNYNAAINKYNHDIALLELDEPLVLNSYVTPICIADKEYTNIFLKFGSGYVSGWGRVFHKGRSALVLQYLRVPLVDEATCLRSTKFTIYNNMFCAGFHEGGRDSCQGDSGGPHVTEVEGTSFLTGIISWGEECAMKGKYGIYTKVSRYVNWIKEKTKLT

SEQ ID NO: 143 - protein, 415 aa, Homo sapiens
  Factor IX R338A
YNSGKLEEFVQGNLERECMEEKCSFEEAREVFENTERTTEFWKQYVDGDQCESNPCLNGGSCKDDINSYECWCPFGFEGKNCELDVTCNIKNGRCEQFCKNSADNKVVCSCTEGYRLAENQKSCEPAVPFPCGRVSVSQTSKLTRAETVFPDVDYVNSTEAETILDNITQSTQSFNDFTRVVGGEDAKPGQFPWQVVLNGKVDAFCGGSIVNEKWIVTAAHCVETGVKITVVAGEHNIEETEHTEQKRNVIRIIPHHNYNAAINKYNHDIALLELDEPLVLNSYVTPICIADKEYTNIFLKFGSGYVSGWGRVFHKGRSALVLQYLRVPLVDRATCLASTKFTIYNNMFCAGFHEGGRDSCQGDSGGPHVTEVEGTSFLTGIISWGEECAMKGKYGIYTKVSRYVNWIKEKTKLT

SEQ ID NO: 144 - protein, 415 aa, Homo sapiens
  Factor IX R338E
YNSGKLEEFVQGNLERECMEEKCSFEEAREVFENTERTTEFWKQYVDGDQCESNPCLNGGSCKDDINSYECWCPFGFEGKNCELDVTCNIKNGRCEQFCKNSADNKVVCSCTEGYRLAENQKSCEPAVPFPCGRVSVSQTSKLTRAETVFPDVDYVNSTEAETILDNITQSTQSFNDFTRVVGGEDAKPGQFPWQVVLNGKVDAFCGGSIVNEKWIVTAAHCVETGVKITVVAGEHNIEETEHTEQKRNVIRIIPHHNYNAAINKYNHDIALLELDEPLVLNSYVTPICIADKEYTNIFLKFGSGYVSGWGRVFHKGRSALVLQYLRVPLVDRATCLESTKFTIYNNMFCAGFHEGGRDSCQGDSGGPHVTEVEGTSFLTGIISWGEECAMKGKYGIYTKVSRYVNWIKEKTKLT

SEQ ID NO: 145 - protein, 415 aa, Homo sapiens
  Factor IX R338A/R403A
YNSGKLEEFVQGNLERECMEEKCSFEEAREVFENTERTTEFWKQYVDGDQCESNPCLNGGSCKDDINSYECWCPFGFEGKNCELDVTCNIKNGRCEQFCKNSADNKVVCSCTEGYRLAENQKSCEPAVPFPCGRVSVSQTSKLTRAETVFPDVDYVNSTEAETILDNITQSTQSFNDFTRVVGGEDAKPGQFPWQVVLNGKVDAFCGGSIVNEKWIVTAAHCVETGVKITVVAGEHNIEETEHTEQKRNVIRIIPHHNYNAAINKYNHDIALLELDEPLVLNSYVTPICIADKEYTNIFLKFGSGYVSGWGRVFHKGRSALVLQYLRVPLVDRATCLASTKFTIYNNMFCAGFHEGGRDSCQGDSGGPHVTEVEGTSFLTGIISWGEECAMKGKYGIYTKVSAYVNWIKEKTKLT

SEQ ID NO: 146 - protein, 415 aa, Homo sapiens
  Factor IX R338E/R403E
YNSGKLEEFVQGNLERECMEEKCSFEEAREVFENTERTTEFWKQYVDGDQCESNPCLNGGSCKDDINSYECWCPFGFEGKNCELDVTCNIKNGRCEQFCKNSADNKVVCSCTEGYRLAENQKSCEPAVPFPCGRVSVSQTSKLTRAETVFPDVDYVNSTEAETILDNITQSTQSFNDFTRVVGGEDAKPGQFPWQVVLNGKVDAFCGGSIVNEKWIVTAAHCVETGVKITVVAGEHNIEETEHTEQKRNVIRIIPHHNYNAAINKYNHDIALLELDEPLVLNSYVTPICIADKEYTNIFLKFGSGYVSGWGRVFHKGRSALVLQYLRVPLVDRATCLESTKFTIYNNMFCAGFHEGGRDSCQGDSGGPHVTEVEGTSFLTGIISWGEECAMKGKYGIYTKVSEYVNWIKEKTKLT

SEQ ID NO: 147 - protein, 415 aa, Homo sapiens
  Factor IX K293A/R403A
YNSGKLEEFVQGNLERECMEEKCSFEEAREVFENTERTTEFWKQYVDGDQCESNPCLNGGSCKDDINSYECWCPFGFEGKNCELDVTCNIKNGRCEQFCKNSADNKVVCSCTEGYRLAENQKSCEPAVPFPCGRVSVSQTSKLTRAETVFPDVDYVNSTEAETILDNITQSTQSFNDFTRVVGGEDAKPGQFPWQVVLNGKVDAFCGGSIVNEKWIVTAAHCVETGVKITVVAGEHNIEETEHTEQKRNVIRIIPHHNYNAAINKYNHDIALLELDEPLVLNSYVTPICIADAEYTNIFLKFGSGYVSGWGRVFHKGRSALVLQYLRVPLVDRATCLRSTKFTIYNNMFCAGFHEGGRDSCQGDSGGPHVTEVEGTSFLTGIISWGEECAMKGKYGIYTKVSAYVNWIKEKTKLT

SEQ ID NO: 148 - protein, 415 aa, Homo sapiens
  Factor IX K293E/R403E
YNSGKLEEFVQGNLERECMEEKCSFEEAREVFENTERTTEFWKQYVDGDQCESNPCLNGGSCKDDINSYECWCPFGFEGKNCELDVTCNIKNGRCEQFCKNSADNKVVCSCTEGYRLAENQKSCEPAVPFPCGRVSVSQTSKLTRAETVFPDVDYVNSTEAETILDNITQSTQSFNDFTRVVGGEDAKPGQFPWQVVLNGKVDAFCGGSIVNEKWIVTAAHCVETGVKITVVAGEHNIEETEHTEQKRNVIRIIPHHNYNAAINKYNHDIALLELDEPLVLNSYVTPICIADEEYTNIFLKFGSGYVSGWGRVFHKGRSALVLQYLRVPLVDRATCLRSTKFTIYNNMFCAGFHEGGRDSCQGDSGGPHVTEVEGTSFLTGIISWGEECAMKGKYGIYTKVSEYVNWIKEKTKLT

SEQ ID NO: 149 - protein, 415 aa, Homo sapiens
  Factor IX K293A/R338A/R403A
YNSGKLEEFVQGNLERECMEEKCSFEEAREVFENTERTTEFWKQYVDGDQCESNPCLNGGSCKDDINSYECWCPFGFEGKNCELDVTCNIKNGRCEQFCKNSADNKVVCSCTEGYRLAENQKSCEPAVPFPCGRVSVSQTSKLTRAETVFPDVDYVNSTEAETILDNITQSTQSFNDFTRVVGGEDAKPGQFPWQVVLNGKVDAFCGGSIVNEKWIVTAAHCVETGVKITVVAGEHNIEETEHTEQKRNVIRIIPHHNYNAAINKYNHDIALLELDEPLVLNSYVTPICIADAEYTNIFLKFGSGYVSGWGRVFHKGRSALVLQYLRVPLVDRATCLASTKFTIYNNMFCAGFHEGGRDSCQGDSGGPHVTEVEGTSFLTGIISWGEECAMKGKYGIYTKVSAYVNWIKEKTKLT

SEQ ID NO: 150 - protein, 415 aa, Homo sapiens
  Factor IX K293E/R338E/R403E
YNSGKLEEFVQGNLERECMEEKCSFEEAREVFENTERTTEFWKQYVDGDQCESNPCLNGGSCKDDINSYECWCPFGFEGKNCELDVTCNIKNGRCEQFCKNSADNKVVCSCTEGYRLAENQKSCEPAVPFPCGRVSVSQTSKLTRAETVFPDVDYVNSTEAETILDNITQSTQSFNDFTRVVGGEDAKPGQFPWQVVLNGKVDAFCGGSIVNEKWIVTAAHCVETGVKITVVAGEHNIEETEHTEQKRNVIRIIPHHNYNAAINKYNHDIALLELDEPLVLNSYVTPICIADEEYTNIFLKFGSGYVSGWGRVFHKGRSALVLQYLRVPLVDRATCLESTKFTIYNNMFCAGFHEGGRDSCQGDSGGPHVTEVEGTSFLTGIISWGEECAMKGKYGIYTKVSEYVNWIKEKTKLT

SEQ ID NO: 151 - protein, 415 aa, Homo sapiens
  Factor IX R318A/R403A
YNSGKLEEFVQGNLERECMEEKCSFEEAREVFENTERTTEFWKQYVDGDQCESNPCLNGGSCKDDINSYECWCPFGFEGKNCELDVTCNIKNGRCEQFCKNSADNKVVCSCTEGYRLAENQKSCEPAVPFPCGRVSVSQTSKLTRAETVFPDVDYVNSTEAETILDNITQSTQSFNDFTRVVGGEDAKPGQFPWQVVLNGKVDAFCGGSIVNEKWIVTAAHCVETGVKITVVAGEHNIEETEHTEQKRNVIRIIPHHNYNAAINKYNHDIALLELDEPLVLNSYVTPICIADKEYTNIFLKFGSGYVSGWGRVFHKGASALVLQYLRVPLVDRATCLRSTKFTIYNNMFCAGFHEGGRDSCQGDSGGPHVTEVEGTSFLTGIISWGEECAMKGKYGIYTKVSAYVNWIKEKTKLT

SEQ ID NO: 152 - protein, 415 aa, Homo sapiens
  Factor IX R318E/R403E
YNSGKLEEFVQGNLERECMEEKCSFEEAREVFENTERTTEFWKQYVDGDQCESNPCLNGGSCKDDINSYECWCPFGFEGKNCELDVTCNIKNGRCEQFCKNSADNKVVCSCTEGYRLAENQKSCEPAVPFPCGRVSVSQTSKLTRAETVFPDVDYVNSTEAETILDNITQSTQSFNDFTRVVGGEDAKPGQFPWQVVLNGKVDAFCGGSIVNEKWIVTAAHCVETGVKITVVAGEHNIEETEHTEQKRNVIRIIPHHNYNAAINKYNHDIALLELDEPLVLNSYVTPICIADKEYTNIFLKFGSGYVSGWGRVFHKGESALVLQYLRVPLVDRATCLRSTKFTIYNNMFCAGFHEGGRDSCQGDSGGPHVTEVEGTSFLTGIISWGEECAMKGKYGIYTKVSEYVNWIKEKTKLT

SEQ ID NO: 153 - protein, 415 aa, Homo sapiens
  Factor IX R318Y/E410N
YNSGKLEEFVQGNLERECMEEKCSFEEAREVFENTERTTEFWKQYVDGDQCESNPCLNGGSCKDDINSYECWCPFGFEGKNCELDVTCNIKNGRCEQFCKNSADNKVVCSCTEGYRLAENQKSCEPAVPFPCGRVSVSQTSKLTRAETVFPDVDYVNSTEAETILDNITQSTQSFNDFTRVVGGEDAKPGQFPWQVVLNGKVDAFCGGSIVNEKWIVTAAHCVETGVKITVVAGEHNIEETEHTEQKRNVIRIIPHHNYNAAINKYNHDIALLELDEPLVLNSYVTPICIADKEYTNIFLKFGSGYVSGWGRVFHKGYSALVLQYLRVPLVDRATCLRSTKFTIYNNMFCAGFHEGGRDSCQGDSGGPHVTEVEGTSFLTGIISWGEECAMKGKYGIYTKVSRYVNWIKNKTKLT

SEQ ID NO: 154 - protein, 415 aa, Homo sapiens
  Factor IX R338E/E410N
YNSGKLEEFVQGNLERECMEEKCSFEEAREVFENTERTTEFWKQYVDGDQCESNPCLNGGSCKDDINSYECWCPFGFEGKNCELDVTCNIKNGRCEQFCKNSADNKVVCSCTEGYRLAENQKSCEPAVPFPCGRVSVSQTSKLTRAETVFPDVDYVNSTEAETILDNITQSTQSFNDFTRVVGGEDAKPGQFPWQVVLNGKVDAFCGGSIVNEKWIVTAAHCVETGVKITVVAGEHNIEETEHTEQKRNVIRIIPHHNYNAAINKYNHDIALLELDEPLVLNSYVTPICIADKEYTNIFLKFGSGYVSGWGRVFHKGRSALVLQYLRVPLVDRATCLESTKFTIYNNMFCAGFHEGGRDSCQGDSGGPHVTEVEGTSFLTGIISWGEECAMKGKYGIYTKVSRYVNWIKNKTKLT

SEQ ID NO: 155 - protein, 415 aa, Homo sapiens
  Factor IX R338E/R403E/E410N
YNSGKLEEFVQGNLERECMEEKCSFEEAREVFENTERTTEFWKQYVDGDQCESNPCLNGGSCKDDINSYECWCPFGFEGKNCELDVTCNIKNGRCEQFCKNSADNKVVCSCTEGYRLAENQKSCEPAVPFPCGRVSVSQTSKLTRAETVFPDVDYVNSTEAETILDNITQSTQSFNDFTRVVGGEDAKPGQFPWQVVLNGKVDAFCGGSIVNEKWIVTAAHCVETGVKITVVAGEHNIEETEHTEQKRNVIRIIPHHNYNAAINKYNHDIALLELDEPLVLNSYVTPICIADKEYTNIFLKFGSGYVSGWGRVFHKGRSALVLQYLRVPLVDRATCLESTKFTIYNNMFCAGFHEGGRDSCQGDSGGPHVTEVEGTSFLTGIISWGEECAMKGKYGIYTKVSEYVNWIKNKTKLT

SEQ ID NO: 156 - protein, 415 aa, Homo sapiens
  Factor IX R318Y/R338E/R403E
YNSGKLEEFVQGNLERECMEEKCSFEEAREVFENTERTTEFWKQYVDGDQCESNPCLNGGSCKDDINSYECWCPFGFEGKNCELDVTCNIKNGRCEQFCKNSADNKVVCSCTEGYRLAENQKSCEPAVPFPCGRVSVSQTSKLTRAETVFPDVDYVNSTEAETILDNITQSTQSFNDFTRVVGGEDAKPGQFPWQVVLNGKVDAFCGGSIVNEKWIVTAAHCVETGVKITVVAGEHNIEETEHTEQKRNVIRIIPHHNYNAAINKYNHDIALLELDEPLVLNSYVTPICIADKEYTNIFLKFGSGYVSGWGRVFHKGYSALVLQYLRVPLVDRATCLESTKFTIYNNMFCAGFHEGGRDSCQGDSGGPHVTEVEGTSFLTGIISWGEECAMKGKYGIYTKVSEYVNWIKEKTKLT

SEQ ID NO: 157 - protein, 415 aa, Homo sapiens
  Factor IX D203N/F205T/K228N
YNSGKLEEFVQGNLERECMEEKCSFEEAREVFENTERTTEFWKQYVDGDQCESNPCLNGGSCKDDINSYECWCPFGFEGKNCELDVTCNIKNGRCEQFCKNSADNKVVCSCTEGYRLAENQKSCEPAVPFPCGRVSVSQTSKLTRAETVFPDVDYVNSTEAETILDNITQSTQSFNDFTRVVGGEDAKPGQFPWQVVLNGKVNATCGGSIVNEKWIVTAAHCVETGVNITVVAGEHNIEETEHTEQKRNVIRIIPHHNYNAAINKYNHDIALLELDEPLVLNSYVTPICIADKEYTNIFLKFGSGYVSGWGRVFHKGRSALVLQYLRVPLVDRATCLRSTKFTIYNNMFCAGFHEGGRDSCQGDSGGPHVTEVEGTSFLTGIISWGEECAMKGKYGIYTKVSRYVNWIKEKTKLT

SEQ ID NO: 158 - protein, 415 aa, Homo sapiens
  Factor IX D203N/F205T/E410N
YNSGKLEEFVQGNLERECMEEKCSFEEAREVFENTERTTEFWKQYVDGDQCESNPCLNGGSCKDDINSYECWCPFGFEGKNCELDVTCNIKNGRCEQFCKNSADNKVVCSCTEGYRLAENQKSCEPAVPFPCGRVSVSQTSKLTRAETVFPDVDYVNSTEAETILDNITQSTQSFNDFTRVVGGEDAKPGQFPWQVVLNGKVNATCGGSIVNEKWIVTAAHCVETGVKITVVAGEHNIEETEHTEQKRNVIRIIPHHNYNAAINKYNHDIALLELDEPLVLNSYVTPICIADKEYTNIFLKFGSGYVSGWGRVFHKGRSALVLQYLRVPLVDRATCLRSTKFTIYNNMFCAGFHEGGRDSCQGDSGGPHVTEVEGTSFLTGIISWGEECAMKGKYGIYTKVSRYVNWIKNKTKLT

SEQ ID NO: 159 - protein, 415 aa, Homo sapiens
  Factor IX D203N/F205T/R338E
YNSGKLEEFVQGNLERECMEEKCSFEEAREVFENTERTTEFWKQYVDGDQCESNPCLNGGSCKDDINSYECWCPFGFEGKNCELDVTCNIKNGRCEQFCKNSADNKVVCSCTEGYRLAENQKSCEPAVPFPCGRVSVSQTSKLTRAETVFPDVDYVNSTEAETILDNITQSTQSFNDFTRVVGGEDAKPGQFPWQVVLNGKVNATCGGSIVNEKWIVTAAHCVETGVKITVVAGEHNIEETEHTEQKRNVIRIIPHHNYNAAINKYNHDIALLELDEPLVLNSYVTPICIADKEYTNIFLKFGSGYVSGWGRVFHKGRSALVLQYLRVPLVDRATCLESTKFTIYNNMFCAGFHEGGRDSCQGDSGGPHVTEVEGTSFLTGIISWGEECAMKGKYGIYTKVSRYVNWIKEKTKLT

SEQ ID NO: 160 - protein, 415 aa, Homo sapiens
  Factor IX D203N/F205T/R338A
YNSGKLEEFVQGNLERECMEEKCSFEEAREVFENTERTTEFWKQYVDGDQCESNPCLNGGSCKDDINSYECWCPFGFEGKNCELDVTCNIKNGRCEQFCKNSADNKVVCSCTEGYRLAENQKSCEPAVPFPCGRVSVSQTSKLTRAETVFPDVDYVNSTEAETILDNITQSTQSFNDFTRVVGGEDAKPGQFPWQVVLNGKVNATCGGSIVNEKWIVTAAHCVETGVKITVVAGEHNIEETEHTEQKRNVIRIIPHHNYNAAINKYNHDIALLELDEPLVLNSYVTPICIADKEYTNIFLKFGSGYVSGWGRVFHKGRSALVLQYLRVPLVDRATCLASTKFTIYNNMFCAGFHEGGRDSCQGDSGGPHVTEVEGTSFLTGIISWGEECAMKGKYGIYTKVSRYVNWIKEKTKLT

SEQ ID NO: 161 - protein, 415 aa, Homo sapiens
  Factor IX D203N/F205T/R318Y
YNSGKLEEFVQGNLERECMEEKCSFEEAREVFENTERTTEFWKQYVDGDQCESNPCLNGGSCKDDINSYECWCPFGFEGKNCELDVTCNIKNGRCEQFCKNSADNKVVCSCTEGYRLAENQKSCEPAVPFPCGRVSVSQTSKLTRAETVFPDVDYVNSTEAETILDNITQSTQSFNDFTRVVGGEDAKPGQFPWQVVLNGKVNATCGGSIVNEKWIVTAAHCVETGVKITVVAGEHNIEETEHTEQKRNVIRIIPHHNYNAAINKYNHDIALLELDEPLVLNSYVTPICIADKEYTNIFLKFGSGYVSGWGRVFHKGYSALVLQYLRVPLVDRATCLRSTKFTIYNNMFCAGFHEGGRDSCQGDSGGPHVTEVEGTSFLTGIISWGEECAMKGKYGIYTKVSRYVNWIKEKTKLT

SEQ ID NO: 162 - protein, 415 aa, Homo sapiens
  Factor IX D203N/F205T/R338E/R403E
YNSGKLEEFVQGNLERECMEEKCSFEEAREVFENTERTTEFWKQYVDGDQCESNPCLNGGSCKDDINSYECWCPFGFEGKNCELDVTCNIKNGRCEQFCKNSADNKVVCSCTEGYRLAENQKSCEPAVPFPCGRVSVSQTSKLTRAETVFPDVDYVNSTEAETILDNITQSTQSFNDFTRVVGGEDAKPGQFPWQVVLNGKVNATCGGSIVNEKWIVTAAHCVETGVKITVVAGEHNIEETEHTEQKRNVIRIIPHHNYNAAINKYNHDIALLELDEPLVLNSYVTPICIADKEYTNIFLKFGSGYVSGWGRVFHKGRSALVLQYLRVPLVDRATCLESTKFTIYNNMFCAGFHEGGRDSCQGDSGGPHVTEVEGTSFLTGIISWGEECAMKGKYGIYTKVSEYVNWIKEKTKLT

SEQ ID NO: 163 - protein, 415 aa, Homo sapiens
  Factor IX K228N/E410N
YNSGKLEEFVQGNLERECMEEKCSFEEAREVFENTERTTEFWKQYVDGDQCESNPCLNGGSCKDDINSYECWCPFGFEGKNCELDVTCNIKNGRCEQFCKNSADNKVVCSCTEGYRLAENQKSCEPAVPFPCGRVSVSQTSKLTRAETVFPDVDYVNSTEAETILDNITQSTQSFNDFTRVVGGEDAKPGQFPWQVVLNGKVDAFCGGSIVNEKWIVTAAHCVETGVNITVVAGEHNIEETEHTEQKRNVIRIIPHHNYNAAINKYNHDIALLELDEPLVLNSYVTPICIADKEYTNIFLKFGSGYVSGWGRVFHKGRSALVLQYLRVPLVDRATCLRSTKFTIYNNMFCAGFHEGGRDSCQGDSGGPHVTEVEGTSFLTGIISWGEECAMKGKYGIYTKVSRYVNWIKNKTKLT

SEQ ID NO: 164 - protein, 415 aa, Homo sapiens
  Factor IX K228N/R338E
YNSGKLEEFVQGNLERECMEEKCSFEEAREVFENTERTTEFWKQYVDGDQCESNPCLNGGSCKDDINSYECWCPFGFEGKNCELDVTCNIKNGRCEQFCKNSADNKVVCSCTEGYRLAENQKSCEPAVPFPCGRVSVSQTSKLTRAETVFPDVDYVNSTEAETILDNITQSTQSFNDFTRVVGGEDAKPGQFPWQVVLNGKVDAFCGGSIVNEKWIVTAAHCVETGVNITVVAGEHNIEETEHTEQKRNVIRIIPHHNYNAAINKYNHDIALLELDEPLVLNSYVTPICIADKEYTNIFLKFGSGYVSGWGRVFHKGRSALVLQYLRVPLVDRATCLESTKFTIYNNMFCAGFHEGGRDSCQGDSGGPHVTEVEGTSFLTGIISWGEECAMKGKYGIYTKVSRYVNWIKEKTKLT

SEQ ID NO: 165 - protein, 415 aa, Homo sapiens
  Factor IX K228N/R338A
YNSGKLEEFVQGNLERECMEEKCSFEEAREVFENTERTTEFWKQYVDGDQCESNPCLNGGSCKDDINSYECWCPFGFEGKNCELDVTCNIKNGRCEQFCKNSADNKVVCSCTEGYRLAENQKSCEPAVPFPCGRVSVSQTSKLTRAETVFPDVDYVNSTEAETILDNITQSTQSFNDFTRVVGGEDAKPGQFPWQVVLNGKVDAFCGGSIVNEKWIVTAAHCVETGVNITVVAGEHNIEETEHTEQKRNVIRIIPHHNYNAAINKYNHDIALLELDEPLVLNSYVTPICIADKEYTNIFLKFGSGYVSGWGRVFHKGRSALVLQYLRVPLVDRATCLASTKFTIYNNMFCAGFHEGGRDSCQGDSGGPHVTEVEGTSFLTGIISWGEECAMKGKYGIYTKVSRYVNWIKEKTKLT

SEQ ID NO: 166 - protein, 415 aa, Homo sapiens
  Factor IX K228N/R318Y
YNSGKLEEFVQGNLERECMEEKCSFEEAREVFENTERTTEFWKQYVDGDQCESNPCLNGGSCKDDINSYECWCPFGFEGKNCELDVTCNIKNGRCEQFCKNSADNKVVCSCTEGYRLAENQKSCEPAVPFPCGRVSVSQTSKLTRAETVFPDVDYVNSTEAETILDNITQSTQSFNDFTRVVGGEDAKPGQFPWQVVLNGKVDAFCGGSIVNEKWIVTAAHCVETGVNITVVAGEHNIEETEHTEQKRNVIRIIPHHNYNAAINKYNHDIALLELDEPLVLNSYVTPICIADKEYTNIFLKFGSGYVSGWGRVFHKGYSALVLQYLRVPLVDRATCLRSTKFTIYNNMFCAGFHEGGRDSCQGDSGGPHVTEVEGTSFLTGIISWGEECAMKGKYGIYTKVSRYVNWIKEKTKLT

SEQ ID NO: 167 - protein, 415 aa, Homo sapiens
  Factor IX K228N/R338E/R403E
YNSGKLEEFVQGNLERECMEEKCSFEEAREVFENTERTTEFWKQYVDGDQCESNPCLNGGSCKDDINSYECWCPFGFEGKNCELDVTCNIKNGRCEQFCKNSADNKVVCSCTEGYRLAENQKSCEPAVPFPCGRVSVSQTSKLTRAETVFPDVDYVNSTEAETILDNITQSTQSFNDFTRVVGGEDAKPGQFPWQVVLNGKVDAFCGGSIVNEKWIVTAAHCVETGVNITVVAGEHNIEETEHTEQKRNVIRIIPHHNYNAAINKYNHDIALLELDEPLVLNSYVTPICIADKEYTNIFLKFGSGYVSGWGRVFHKGRSALVLQYLRVPLVDRATCLESTKFTIYNNMFCAGFHEGGRDSCQGDSGGPHVTEVEGTSFLTGIISWGEECAMKGKYGIYTKVSEYVNWIKEKTKLT

SEQ ID NO: 168 - protein, 415 aa, Homo sapiens
  Factor IX R403E/E410N
YNSGKLEEFVQGNLERECMEEKCSFEEAREVFENTERTTEFWKQYVDGDQCESNPCLNGGSCKDDINSYECWCPFGFEGKNCELDVTCNIKNGRCEQFCKNSADNKVVCSCTEGYRLAENQKSCEPAVPFPCGRVSVSQTSKLTRAETVFPDVDYVNSTEAETILDNITQSTQSFNDFTRVVGGEDAKPGQFPWQVVLNGKVDAFCGGSIVNEKWIVTAAHCVETGVKITVVAGEHNIEETEHTEQKRNVIRIIPHHNYNAAINKYNHDIALLELDEPLVLNSYVTPICIADKEYTNIFLKFGSGYVSGWGRVFHKGRSALVLQYLRVPLVDRATCLRSTKFTIYNNMFCAGFHEGGRDSCQGDSGGPHVTEVEGTSFLTGIISWGEECAMKGKYGIYTKVSEYVNWIKNKTKLT

SEQ ID NO: 169 - protein, 415 aa, Homo sapiens
  Factor IX R318Y/R338E/E410N
YNSGKLEEFVQGNLERECMEEKCSFEEAREVFENTERTTEFWKQYVDGDQCESNPCLNGGSCKDDINSYECWCPFGFEGKNCELDVTCNIKNGRCEQFCKNSADNKVVCSCTEGYRLAENQKSCEPAVPFPCGRVSVSQTSKLTRAETVFPDVDYVNSTEAETILDNITQSTQSFNDFTRVVGGEDAKPGQFPWQVVLNGKVDAFCGGSIVNEKWIVTAAHCVETGVKITVVAGEHNIEETEHTEQKRNVIRIIPHHNYNAAINKYNHDIALLELDEPLVLNSYVTPICIADKEYTNIFLKFGSGYVSGWGRVFHKGYSALVLQYLRVPLVDRATCLESTKFTIYNNMFCAGFHEGGRDSCQGDSGGPHVTEVEGTSFLTGIISWGEECAMKGKYGIYTKVSRYVNWIKNKTKLT

SEQ ID NO: 170 - protein, 415 aa, Homo sapiens
  Factor IX K228N/R318Y/E410N
YNSGKLEEFVQGNLERECMEEKCSFEEAREVFENTERTTEFWKQYVDGDQCESNPCLNGGSCKDDINSYECWCPFGFEGKNCELDVTCNIKNGRCEQFCKNSADNKVVCSCTEGYRLAENQKSCEPAVPFPCGRVSVSQTSKLTRAETVFPDVDYVNSTEAETILDNITQSTQSFNDFTRVVGGEDAKPGQFPWQVVLNGKVDAFCGGSIVNEKWIVTAAHCVETGVNITVVAGEHNIEETEHTEQKRNVIRIIPHHNYNAAINKYNHDIALLELDEPLVLNSYVTPICIADKEYTNIFLKFGSGYVSGWGRVFHKGYSALVLQYLRVPLVDRATCLRSTKFTIYNNMFCAGFHEGGRDSCQGDSGGPHVTEVEGTSFLTGIISWGEECAMKGKYGIYTKVSRYVNWIKNKTKLT

SEQ ID NO: 171 - protein, 415 aa, Homo sapiens
  Factor IX R318Y/R403E/E410N
YNSGKLEEFVQGNLERECMEEKCSFEEAREVFENTERTTEFWKQYVDGDQCESNPCLNGGSCKDDINSYECWCPFGFEGKNCELDVTCNIKNGRCEQFCKNSADNKVVCSCTEGYRLAENQKSCEPAVPFPCGRVSVSQTSKLTRAETVFPDVDYVNSTEAETILDNITQSTQSFNDFTRVVGGEDAKPGQFPWQVVLNGKVDAFCGGSIVNEKWIVTAAHCVETGVKITVVAGEHNIEETEHTEQKRNVIRIIPHHNYNAAINKYNHDIALLELDEPLVLNSYVTPICIADKEYTNIFLKFGSGYVSGWGRVFHKGYSALVLQYLRVPLVDRATCLRSTKFTIYNNMFCAGFHEGGRDSCQGDSGGPHVTEVEGTSFLTGIISWGEECAMKGKYGIYTKVSEYVNWIKNKTKLT

SEQ ID NO: 172 - protein, 415 aa, Homo sapiens
  Factor IX R318Y/R338E/R403E/E410N
YNSGKLEEFVQGNLERECMEEKCSFEEAREVFENTERTTEFWKQYVDGDQCESNPCLNGGSCKDDINSYECWCPFGFEGKNCELDVTCNIKNGRCEQFCKNSADNKVVCSCTEGYRLAENQKSCEPAVPFPCGRVSVSQTSKLTRAETVFPDVDYVNSTEAETILDNITQSTQSFNDFTRVVGGEDAKPGQFPWQVVLNGKVDAFCGGSIVNEKWIVTAAHCVETGVKITVVAGEHNIEETEHTEQKRNVIRIIPHHNYNAAINKYNHDIALLELDEPLVLNSYVTPICIADKEYTNIFLKFGSGYVSGWGRVFHKGYSALVLQYLRVPLVDRATCLESTKFTIYNNMFCAGFHEGGRDSCQGDSGGPHVTEVEGTSFLTGIISWGEECAMKGKYGIYTKVSEYVNWIKNKTKLT

SEQ ID NO: 173 - protein, 415 aa, Homo sapiens
  Factor IX D203N/F205T/R318Y/E410N
YNSGKLEEFVQGNLERECMEEKCSFEEAREVFENTERTTEFWKQYVDGDQCESNPCLNGGSCKDDINSYECWCPFGFEGKNCELDVTCNIKNGRCEQFCKNSADNKVVCSCTEGYRLAENQKSCEPAVPFPCGRVSVSQTSKLTRAETVFPDVDYVNSTEAETILDNITQSTQSFNDFTRVVGGEDAKPGQFPWQVVLNGKVNATCGGSIVNEKWIVTAAHCVETGVKITVVAGEHNIEETEHTEQKRNVIRIIPHHNYNAAINKYNHDIALLELDEPLVLNSYVTPICIADKEYTNIFLKFGSGYVSGWGRVFHKGYSALVLQYLRVPLVDRATCLRSTKFTIYNNMFCAGFHEGGRDSCQGDSGGPHVTEVEGTSFLTGIISWGEECAMKGKYGIYTKVSRYVNWIKNKTKLT

SEQ ID NO: 174 - protein, 415 aa, Homo sapiens
  Factor IX E410Q
YNSGKLEEFVQGNLERECMEEKCSFEEAREVFENTERTTEFWKQYVDGDQCESNPCLNGGSCKDDINSYECWCPFGFEGKNCELDVTCNIKNGRCEQFCKNSADNKVVCSCTEGYRLAENQKSCEPAVPFPCGRVSVSQTSKLTRAETVFPDVDYVNSTEAETILDNITQSTQSFNDFTRVVGGEDAKPGQFPWQVVLNGKVDAFCGGSIVNEKWIVTAAHCVETGVKITVVAGEHNIEETEHTEQKRNVIRIIPHHNYNAAINKYNHDIALLELDEPLVLNSYVTPICIADKEYTNIFLKFGSGYVSGWGRVFHKGRSALVLQYLRVPLVDRATCLRSTKFTIYNNMFCAGFHEGGRDSCQGDSGGPHVTEVEGTSFLTGIISWGEECAMKGKYGIYTKVSRYVNWIKQKTKLT

SEQ ID NO: 175 - protein, 415 aa, Homo sapiens
  Factor IX E410S
YNSGKLEEFVQGNLERECMEEKCSFEEAREVFENTERTTEFWKQYVDGDQCESNPCLNGGSCKDDINSYECWCPFGFEGKNCELDVTCNIKNGRCEQFCKNSADNKVVCSCTEGYRLAENQKSCEPAVPFPCGRVSVSQTSKLTRAETVFPDVDYVNSTEAETILDNITQSTQSFNDFTRVVGGEDAKPGQFPWQVVLNGKVDAFCGGSIVNEKWIVTAAHCVETGVKITVVAGEHNIEETEHTEQKRNVIRIIPHHNYNAAINKYNHDIALLELDEPLVLNSYVTPICIADKEYTNIFLKFGSGYVSGWGRVFHKGRSALVLQYLRVPLVDRATCLRSTKFTIYNNMFCAGFHEGGRDSCQGDSGGPHVTEVEGTSFLTGIISWGEECAMKGKYGIYTKVSRYVNWIKSKTKLT

SEQ ID NO: 176 - protein, 415 aa, Homo sapiens
  Factor IX E410A
YNSGKLEEFVQGNLERECMEEKCSFEEAREVFENTERTTEFWKQYVDGDQCESNPCLNGGSCKDDINSYECWCPFGFEGKNCELDVTCNIKNGRCEQFCKNSADNKVVCSCTEGYRLAENQKSCEPAVPFPCGRVSVSQTSKLTRAETVFPDVDYVNSTEAETILDNITQSTQSFNDFTRVVGGEDAKPGQFPWQVVLNGKVDAFCGGSIVNEKWIVTAAHCVETGVKITVVAGEHNIEETEHTEQKRNVIRIIPHHNYNAAINKYNHDIALLELDEPLVLNSYVTPICIADKEYTNIFLKFGSGYVSGWGRVFHKGRSALVLQYLRVPLVDRATCLRSTKFTIYNNMFCAGFHEGGRDSCQGDSGGPHVTEVEGTSFLTGIISWGEECAMKGKYGIYTKVSRYVNWIKAKTKLT

SEQ ID NO: 177 - protein, 415 aa, Artificial Sequence
  Factor IX F314N/K316S
YNSGKLEEFVQGNLERECMEEKCSFEEAREVFENTERTTEFWKQYVDGDQCESNPCLNGGSCKDDINSYECWCPFGFEGKNCELDVTCNIKNGRCEQFCKNSADNKVVCSCTEGYRLAENQKSCEPAVPFPCGRVSVSQTSKLTRAETVFPDVDYVNSTEAETILDNITQSTQSFNDFTRVVGGEDAKPGQFPWQVVLNGKVDAFCGGSIVNEKWIVTAAHCVETGVKITVVAGEHNIEETEHTEQKRNVIRIIPHHNYNAAINKYNHDIALLELDEPLVLNSYVTPICIADKEYTNIFLKFGSGYVSGWGRVNHSGRSALVLQYLRVPLVDRATCLRSTKFTIYNNMFCAGFHEGGRDSCQGDSGGPHVTEVEGTSFLTGIISWGEECAMKGKYGIYTKVSRYVNWIKEKTKLT

SEQ ID NO: 178 - protein, 415 aa, Artificial Sequence
  Factor IX A103N/N105S/K247N/N249S
YNSGKLEEFVQGNLERECMEEKCSFEEAREVFENTERTTEFWKQYVDGDQCESNPCLNGGSCKDDINSYECWCPFGFEGKNCELDVTCNIKNGRCEQFCKNSNDSKVVCSCTEGYRLAENQKSCEPAVPFPCGRVSVSQTSKLTRAETVFPDVDYVNSTEAETILDNITQSTQSFNDFTRVVGGEDAKPGQFPWQVVLNGKVDAFCGGSIVNEKWIVTAAHCVETGVKITVVAGEHNIEETEHTEQNRSVIRIIPHHNYNAAINKYNHDIALLELDEPLVLNSYVTPICIADKEYTNIFLKFGSGYVSGWGRVFHKGRSALVLQYLRVPLVDRATCLRSTKFTIYNNMFCAGFHEGGRDSCQGDSGGPHVTEVEGTSFLTGIISWGEECAMKGKYGIYTKVSRYVNWIKEKTKLT

SEQ ID NO: 179 - protein, 415 aa, Artificial Sequence
  Factor IX D104N/K106S/K247N/N249S
YNSGKLEEFVQGNLERECMEEKCSFEEAREVFENTERTTEFWKQYVDGDQCESNPCLNGGSCKDDINSYECWCPFGFEGKNCELDVTCNIKNGRCEQFCKNSANNSVVCSCTEGYRLAENQKSCEPAVPFPCGRVSVSQTSKLTRAETVFPDVDYVNSTEAETILDNITQSTQSFNDFTRVVGGEDAKPGQFPWQVVLNGKVDAFCGGSIVNEKWIVTAAHCVETGVKITVVAGEHNIEETEHTEQNRSVIRIIPHHNYNAAINKYNHDIALLELDEPLVLNSYVTPICIADKEYTNIFLKFGSGYVSGWGRVFHKGRSALVLQYLRVPLVDRATCLRSTKFTIYNNMFCAGFHEGGRDSCQGDSGGPHVTEVEGTSFLTGIISWGEECAMKGKYGIYTKVSRYVNWIKEKTKLT

SEQ ID NO: 180 - protein, 415 aa, Artificial Sequence
  Factor IX K228N/I251S
YNSGKLEEFVQGNLERECMEEKCSFEEAREVFENTERTTEFWKQYVDGDQCESNPCLNGGSCKDDINSYECWCPFGFEGKNCELDVTCNIKNGRCEQFCKNSADNKVVCSCTEGYRLAENQKSCEPAVPFPCGRVSVSQTSKLTRAETVFPDVDYVNSTEAETILDNITQSTQSFNDFTRVVGGEDAKPGQFPWQVVLNGKVDAFCGGSIVNEKWIVTAAHCVETGVNITVVAGEHNIEETEHTEQKRNVSRIIPHHNYNAAINKYNHDIALLELDEPLVLNSYVTPICIADKEYTNIFLKFGSGYVSGWGRVFHKGRSALVLQYLRVPLVDRATCLRSTKFTIYNNMFCAGFHEGGRDSCQGDSGGPHVTEVEGTSFLTGIISWGEECAMKGKYGIYTKVSRYVNWIKEKTKLT

SEQ ID NO: 181 - protein, 415 aa, Artificial Sequence
  Factor IX A103N/N105S/I251S
YNSGKLEEFVQGNLERECMEEKCSFEEAREVFENTERTTEFWKQYVDGDQCESNPCLNGGSCKDDINSYECWCPFGFEGKNCELDVTCNIKNGRCEQFCKNSNDSKVVCSCTEGYRLAENQKSCEPAVPFPCGRVSVSQTSKLTRAETVFPDVDYVNSTEAETILDNITQSTQSFNDFTRVVGGEDAKPGQFPWQVVLNGKVDAFCGGSIVNEKWIVTAAHCVETGVKITVVAGEHNIEETEHTEQKRNVSRIIPHHNYNAAINKYNHDIALLELDEPLVLNSYVTPICIADKEYTNIFLKFGSGYVSGWGRVFHKGRSALVLQYLRVPLVDRATCLRSTKFTIYNNMFCAGFHEGGRDSCQGDSGGPHVTEVEGTSFLTGIISWGEECAMKGKYGIYTKVSRYVNWIKEKTKLT

SEQ ID NO: 182 - protein, 415 aa, Artificial Sequence
  Factor IX D104N/K106S/I251S
YNSGKLEEFVQGNLERECMEEKCSFEEAREVFENTERTTEFWKQYVDGDQCESNPCLNGGSCKDDINSYECWCPFGFEGKNCELDVTCNIKNGRCEQFCKNSANNSVVCSCTEGYRLAENQKSCEPAVPFPCGRVSVSQTSKLTRAETVFPDVDYVNSTEAETILDNITQSTQSFNDFTRVVGGEDAKPGQFPWQVVLNGKVDAFCGGSIVNEKWIVTAAHCVETGVKITVVAGEHNIEETEHTEQKRNVSRIIPHHNYNAAINKYNHDIALLELDEPLVLNSYVTPICIADKEYTNIFLKFGSGYVSGWGRVFHKGRSALVLQYLRVPLVDRATCLRSTKFTIYNNMFCAGFHEGGRDSCQGDSGGPHVTEVEGTSFLTGIISWGEECAMKGKYGIYTKVSRYVNWIKEKTKLT

SEQ ID NO: 183 - protein, 415 aa, Artificial Sequence
  Factor IX K228N/K247N/N249S
YNSGKLEEFVQGNLERECMEEKCSFEEAREVFENTERTTEFWKQYVDGDQCESNPCLNGGSCKDDINSYECWCPFGFEGKNCELDVTCNIKNGRCEQFCKNSADNKVVCSCTEGYRLAENQKSCEPAVPFPCGRVSVSQTSKLTRAETVFPDVDYVNSTEAETILDNITQSTQSFNDFTRVVGGEDAKPGQFPWQVVLNGKVDAFCGGSIVNEKWIVTAAHCVETGVNITVVAGEHNIEETEHTEQNRSVIRIIPHHNYNAAINKYNHDIALLELDEPLVLNSYVTPICIADKEYTNIFLKFGSGYVSGWGRVFHKGRSALVLQYLRVPLVDRATCLRSTKFTIYNNMFCAGFHEGGRDSCQGDSGGPHVTEVEGTSFLTGIISWGEECAMKGKYGIYTKVSRYVNWIKEKTKLT

SEQ ID NO: 184 - protein, 415 aa, Artificial Sequence
  Factor IX D104N/K106S/K228N/K247N/N249S
YNSGKLEEFVQGNLERECMEEKCSFEEAREVFENTERTTEFWKQYVDGDQCESNPCLNGGSCKDDINSYECWCPFGFEGKNCELDVTCNIKNGRCEQFCKNSANNSVVCSCTEGYRLAENQKSCEPAVPFPCGRVSVSQTSKLTRAETVFPDVDYVNSTEAETILDNITQSTQSFNDFTRVVGGEDAKPGQFPWQVVLNGKVDAFCGGSIVNEKWIVTAAHCVETGVNITVVAGEHNIEETEHTEQNRSVIRIIPHHNYNAAINKYNHDIALLELDEPLVLNSYVTPICIADKEYTNIFLKFGSGYVSGWGRVFHKGRSALVLQYLRVPLVDRATCLRSTKFTIYNNMFCAGFHEGGRDSCQGDSGGPHVTEVEGTSFLTGIISWGEECAMKGKYGIYTKVSRYVNWIKEKTKLT

SEQ ID NO: 185 - protein, 415 aa, Artificial Sequence
  Factor IX D104N/K106S/N260S
YNSGKLEEFVQGNLERECMEEKCSFEEAREVFENTERTTEFWKQYVDGDQCESNPCLNGGSCKDDINSYECWCPFGFEGKNCELDVTCNIKNGRCEQFCKNSANNSVVCSCTEGYRLAENQKSCEPAVPFPCGRVSVSQTSKLTRAETVFPDVDYVNSTEAETILDNITQSTQSFNDFTRVVGGEDAKPGQFPWQVVLNGKVDAFCGGSIVNEKWIVTAAHCVETGVKITVVAGEHNIEETEHTEQKRNVIRIIPHHNYSAAINKYNHDIALLELDEPLVLNSYVTPICIADKEYTNIFLKFGSGYVSGWGRVFHKGRSALVLQYLRVPLVDRATCLRSTKFTIYNNMFCAGFHEGGRDSCQGDSGGPHVTEVEGTSFLTGIISWGEECAMKGKYGIYTKVSRYVNWIKEKTKLT

SEQ ID NO: 186 - protein, 415 aa, Artificial Sequence
  Factor IX R333S
YNSGKLEEFVQGNLERECMEEKCSFEEAREVFENTERTTEFWKQYVDGDQCESNPCLNGGSCKDDINSYECWCPFGFEGKNCELDVTCNIKNGRCEQFCKNSADNKVVCSCTEGYRLAENQKSCEPAVPFPCGRVSVSQTSKLTRAETVFPDVDYVNSTEAETILDNITQSTQSFNDFTRVVGGEDAKPGQFPWQVVLNGKVDAFCGGSIVNEKWIVTAAHCVETGVKITVVAGEHNIEETEHTEQKRNVIRIIPHHNYNAAINKYNHDIALLELDEPLVLNSYVTPICIADKEYTNIFLKFGSGYVSGWGRVFHKGRSALVLQYLRVPLVDSATCLRSTKFTIYNNMFCAGFHEGGRDSCQGDSGGPHVTEVEGTSFLTGIISWGEECAMKGKYGIYTKVSRYVNWIKEKTKLT

SEQ ID NO: 187 - protein, 415 aa, Artificial Sequence
  Factor IX R333L
YNSGKLEEFVQGNLERECMEEKCSFEEAREVFENTERTTEFWKQYVDGDQCESNPCLNGGSCKDDINSYECWCPFGFEGKNCELDVTCNIKNGRCEQFCKNSADNKVVCSCTEGYRLAENQKSCEPAVPFPCGRVSVSQTSKLTRAETVFPDVDYVNSTEAETILDNITQSTQSFNDFTRVVGGEDAKPGQFPWQVVLNGKVDAFCGGSIVNEKWIVTAAHCVETGVKITVVAGEHNIEETEHTEQKRNVIRIIPHHNYNAAINKYNHDIALLELDEPLVLNSYVTPICIADKEYTNIFLKFGSGYVSGWGRVFHKGRSALVLQYLRVPLVDLATCLRSTKFTIYNNMFCAGFHEGGRDSCQGDSGGPHVTEVEGTSFLTGIISWGEECAMKGKYGIYTKVSRYVNWIKEKTKLT

SEQ ID NO: 188 - protein, 415 aa, Artificial Sequence
  Factor IX R318Y/R338E
YNSGKLEEFVQGNLERECMEEKCSFEEAREVFENTERTTEFWKQYVDGDQCESNPCLNGGSCKDDINSYECWCPFGFEGKNCELDVTCNIKNGRCEQFCKNSADNKVVCSCTEGYRLAENQKSCEPAVPFPCGRVSVSQTSKLTRAETVFPDVDYVNSTEAETILDNITQSTQSFNDFTRVVGGEDAKPGQFPWQVVLNGKVDAFCGGSIVNEKWIVTAAHCVETGVKITVVAGEHNIEETEHTEQKRNVIRIIPHHNYNAAINKYNHDIALLELDEPLVLNSYVTPICIADKEYTNIFLKFGSGYVSGWGRVFHKGYSALVLQYLRVPLVDRATCLESTKFTIYNNMFCAGFHEGGRDSCQGDSGGPHVTEVEGTSFLTGIISWGEECAMKGKYGIYTKVSRYVNWIKEKTKLT

SEQ ID NO: 189 - protein, 415 aa, Artificial Sequence
  Factor IX K316N
YNSGKLEEFVQGNLERECMEEKCSFEEAREVFENTERTTEFWKQYVDGDQCESNPCLNGGSCKDDINSYECWCPFGFEGKNCELDVTCNIKNGRCEQFCKNSADNKVVCSCTEGYRLAENQKSCEPAVPFPCGRVSVSQTSKLTRAETVFPDVDYVNSTEAETILDNITQSTQSFNDFTRVVGGEDAKPGQFPWQVVLNGKVDAFCGGSIVNEKWIVTAAHCVETGVKITVVAGEHNIEETEHTEQKRNVIRIIPHHNYNAAINKYNHDIALLELDEPLVLNSYVTPICIADKEYTNIFLKFGSGYVSGWGRVFHNGRSALVLQYLRVPLVDRATCLRSTKFTIYNNMFCAGFHEGGRDSCQGDSGGPHVTEVEGTSFLTGIISWGEECAMKGKYGIYTKVSRYVNWIKEKTKLT

SEQ ID NO: 190 - protein, 415 aa, Artificial Sequence
  Factor IX K316A
YNSGKLEEFVQGNLERECMEEKCSFEEAREVFENTERTTEFWKQYVDGDQCESNPCLNGGSCKDDINSYECWCPFGFEGKNCELDVTCNIKNGRCEQFCKNSADNKVVCSCTEGYRLAENQKSCEPAVPFPCGRVSVSQTSKLTRAETVFPDVDYVNSTEAETILDNITQSTQSFNDFTRVVGGEDAKPGQFPWQVVLNGKVDAFCGGSIVNEKWIVTAAHCVETGVKITVVAGEHNIEETEHTEQKRNVIRIIPHHNYNAAINKYNHDIALLELDEPLVLNSYVTPICIADKEYTNIFLKFGSGYVSGWGRVFHAGRSALVLQYLRVPLVDRATCLRSTKFTIYNNMFCAGFHEGGRDSCQGDSGGPHVTEVEGTSFLTGIISWGEECAMKGKYGIYTKVSRYVNWIKEKTKLT

SEQ ID NO: 191 - protein, 415 aa, Artificial Sequence
  Factor IX K316E
YNSGKLEEFVQGNLERECMEEKCSFEEAREVFENTERTTEFWKQYVDGDQCESNPCLNGGSCKDDINSYECWCPFGFEGKNCELDVTCNIKNGRCEQFCKNSADNKVVCSCTEGYRLAENQKSCEPAVPFPCGRVSVSQTSKLTRAETVFPDVDYVNSTEAETILDNITQSTQSFNDFTRVVGGEDAKPGQFPWQVVLNGKVDAFCGGSIVNEKWIVTAAHCVETGVKITVVAGEHNIEETEHTEQKRNVIRIIPHHNYNAAINKYNHDIALLELDEPLVLNSYVTPICIADKEYTNIFLKFGSGYVSGWGRVFHEGRSALVLQYLRVPLVDRATCLRSTKFTIYNNMFCAGFHEGGRDSCQGDSGGPHVTEVEGTSFLTGIISWGEECAMKGKYGIYTKVSRYVNWIKEKTKLT

SEQ ID NO: 192 - protein, 415 aa, Artificial Sequence
  Factor IX K316S
YNSGKLEEFVQGNLERECMEEKCSFEEAREVFENTERTTEFWKQYVDGDQCESNPCLNGGSCKDDINSYECWCPFGFEGKNCELDVTCNIKNGRCEQFCKNSADNKVVCSCTEGYRLAENQKSCEPAVPFPCGRVSVSQTSKLTRAETVFPDVDYVNSTEAETILDNITQSTQSFNDFTRVVGGEDAKPGQFPWQVVLNGKVDAFCGGSIVNEKWIVTAAHCVETGVKITVVAGEHNIEETEHTEQKRNVIRIIPHHNYNAAINKYNHDIALLELDEPLVLNSYVTPICIADKEYTNIFLKFGSGYVSGWGRVFHSGRSALVLQYLRVPLVDRATCLRSTKFTIYNNMFCAGFHEGGRDSCQGDSGGPHVTEVEGTSFLTGIISWGEECAMKGKYGIYTKVSRYVNWIKEKTKLT

SEQ ID NO: 193 - protein, 415 aa, Artificial Sequence
  Factor IX K316M
YNSGKLEEFVQGNLERECMEEKCSFEEAREVFENTERTTEFWKQYVDGDQCESNPCLNGGSCKDDINSYECWCPFGFEGKNCELDVTCNIKNGRCEQFCKNSADNKVVCSCTEGYRLAENQKSCEPAVPFPCGRVSVSQTSKLTRAETVFPDVDYVNSTEAETILDNITQSTQSFNDFTRVVGGEDAKPGQFPWQVVLNGKVDAFCGGSIVNEKWIVTAAHCVETGVKITVVAGEHNIEETEHTEQKRNVIRIIPHHNYNAAINKYNHDIALLELDEPLVLNSYVTPICIADKEYTNIFLKFGSGYVSGWGRVFHMGRSALVLQYLRVPLVDRATCLRSTKFTIYNNMFCAGFHEGGRDSCQGDSGGPHVTEVEGTSFLTGIISWGEECAMKGKYGIYTKVSRYVNWIKEKTKLT

SEQ ID NO: 194 - protein, 415 aa, Artificial Sequence
  Factor IX E239S
YNSGKLEEFVQGNLERECMEEKCSFEEAREVFENTERTTEFWKQYVDGDQCESNPCLNGGSCKDDINSYECWCPFGFEGKNCELDVTCNIKNGRCEQFCKNSADNKVVCSCTEGYRLAENQKSCEPAVPFPCGRVSVSQTSKLTRAETVFPDVDYVNSTEAETILDNITQSTQSFNDFTRVVGGEDAKPGQFPWQVVLNGKVDAFCGGSIVNEKWIVTAAHCVETGVKITVVAGEHNISETEHTEQKRNVIRIIPHHNYNAAINKYNHDIALLELDEPLVLNSYVTPICIADKEYTNIFLKFGSGYVSGWGRVFHKGRSALVLQYLRVPLVDRATCLRSTKFTIYNNMFCAGFHEGGRDSCQGDSGGPHVTEVEGTSFLTGIISWGEECAMKGKYGIYTKVSRYVNWIKEKTKLT

SEQ ID NO: 195 - protein, 415 aa, Artificial Sequence
  Factor IX E239A
YNSGKLEEFVQGNLERECMEEKCSFEEAREVFENTERTTEFWKQYVDGDQCESNPCLNGGSCKDDINSYECWCPFGFEGKNCELDVTCNIKNGRCEQFCKNSADNKVVCSCTEGYRLAENQKSCEPAVPFPCGRVSVSQTSKLTRAETVFPDVDYVNSTEAETILDNITQSTQSFNDFTRVVGGEDAKPGQFPWQVVLNGKVDAFCGGSIVNEKWIVTAAHCVETGVKITVVAGEHNIAETEHTEQKRNVIRIIPHHNYNAAINKYNHDIALLELDEPLVLNSYVTPICIADKEYTNIFLKFGSGYVSGWGRVFHKGRSALVLQYLRVPLVDRATCLRSTKFTIYNNMFCAGFHEGGRDSCQGDSGGPHVTEVEGTSFLTGIISWGEECAMKGKYGIYTKVSRYVNWIKEKTKLT

SEQ ID NO: 196 - protein, 415 aa, Artificial Sequence
  Factor IX E239R
YNSGKLEEFVQGNLERECMEEKCSFEEAREVFENTERTTEFWKQYVDGDQCESNPCLNGGSCKDDINSYECWCPFGFEGKNCELDVTCNIKNGRCEQFCKNSADNKVVCSCTEGYRLAENQKSCEPAVPFPCGRVSVSQTSKLTRAETVFPDVDYVNSTEAETILDNITQSTQSFNDFTRVVGGEDAKPGQFPWQVVLNGKVDAFCGGSIVNEKWIVTAAHCVETGVKITVVAGEHNIRETEHTEQKRNVIRIIPHHNYNAAINKYNHDIALLELDEPLVLNSYVTPICIADKEYTNIFLKFGSGYVSGWGRVFHKGRSALVLQYLRVPLVDRATCLRSTKFTIYNNMFCAGFHEGGRDSCQGDSGGPHVTEVEGTSFLTGIISWGEECAMKGKYGIYTKVSRYVNWIKEKTKLT

SEQ ID NO: 197 - protein, 415 aa, Artificial Sequence
  Factor IX E239K
YNSGKLEEFVQGNLERECMEEKCSFEEAREVFENTERTTEFWKQYVDGDQCESNPCLNGGSCKDDINSYECWCPFGFEGKNCELDVTCNIKNGRCEQFCKNSADNKVVCSCTEGYRLAENQKSCEPAVPFPCGRVSVSQTSKLTRAETVFPDVDYVNSTEAETILDNITQSTQSFNDFTRVVGGEDAKPGQFPWQVVLNGKVDAFCGGSIVNEKWIVTAAHCVETGVKITVVAGEHNIKETEHTEQKRNVIRIIPHHNYNAAINKYNHDIALLELDEPLVLNSYVTPICIADKEYTNIFLKFGSGYVSGWGRVFHKGRSALVLQYLRVPLVDRATCLRSTKFTIYNNMFCAGFHEGGRDSCQGDSGGPHVTEVEGTSFLTGIISWGEECAMKGKYGIYTKVSRYVNWIKEKTKLT

SEQ ID NO: 198 - protein, 415 aa, Artificial Sequence
  Factor IX H257F
YNSGKLEEFVQGNLERECMEEKCSFEEAREVFENTERTTEFWKQYVDGDQCESNPCLNGGSCKDDINSYECWCPFGFEGKNCELDVTCNIKNGRCEQFCKNSADNKVVCSCTEGYRLAENQKSCEPAVPFPCGRVSVSQTSKLTRAETVFPDVDYVNSTEAETILDNITQSTQSFNDFTRVVGGEDAKPGQFPWQVVLNGKVDAFCGGSIVNEKWIVTAAHCVETGVKITVVAGEHNIEETEHTEQKRNVIRIIPHFNYNAAINKYNHDIALLELDEPLVLNSYVTPICIADKEYTNIFLKFGSGYVSGWGRVFHKGRSALVLQYLRVPLVDRATCLRSTKFTIYNNMFCAGFHEGGRDSCQGDSGGPHVTEVEGTSFLTGIISWGEECAMKGKYGIYTKVSRYVNWIKEKTKLT

SEQ ID NO: 199 - protein, 415 aa, Artificial Sequence
  Factor IX H257Y
YNSGKLEEFVQGNLERECMEEKCSFEEAREVFENTERTTEFWKQYVDGDQCESNPCLNGGSCKDDINSYECWCPFGFEGKNCELDVTCNIKNGRCEQFCKNSADNKVVCSCTEGYRLAENQKSCEPAVPFPCGRVSVSQTSKLTRAETVFPDVDYVNSTEAETILDNITQSTQSFNDFTRVVGGEDAKPGQFPWQVVLNGKVDAFCGGSIVNEKWIVTAAHCVETGVKITVVAGEHNIEETEHTEQKRNVIRIIPHYNYNAAINKYNHDIALLELDEPLVLNSYVTPICIADKEYTNIFLKFGSGYVSGWGRVFHKGRSALVLQYLRVPLVDRATCLRSTKFTIYNNMFCAGFHEGGRDSCQGDSGGPHVTEVEGTSFLTGIISWGEECAMKGKYGIYTKVSRYVNWIKEKTKLT

SEQ ID NO: 200 - protein, 415 aa, Artificial Sequence
  Factor IX H257E
YNSGKLEEFVQGNLERECMEEKCSFEEAREVFENTERTTEFWKQYVDGDQCESNPCLNGGSCKDDINSYECWCPFGFEGKNCELDVTCNIKNGRCEQFCKNSADNKVVCSCTEGYRLAENQKSCEPAVPFPCGRVSVSQTSKLTRAETVFPDVDYVNSTEAETILDNITQSTQSFNDFTRVVGGEDAKPGQFPWQVVLNGKVDAFCGGSIVNEKWIVTAAHCVETGVKITVVAGEHNIEETEHTEQKRNVIRIIPHENYNAAINKYNHDIALLELDEPLVLNSYVTPICIADKEYTNIFLKFGSGYVSGWGRVFHKGRSALVLQYLRVPLVDRATCLRSTKFTIYNNMFCAGFHEGGRDSCQGDSGGPHVTEVEGTSFLTGIISWGEECAMKGKYGIYTKVSRYVNWIKEKTKLT

SEQ ID NO: 201 - protein, 415 aa, Artificial Sequence
  Factor IX H257S
YNSGKLEEFVQGNLERECMEEKCSFEEAREVFENTERTTEFWKQYVDGDQCESNPCLNGGSCKDDINSYECWCPFGFEGKNCELDVTCNIKNGRCEQFCKNSADNKVVCSCTEGYRLAENQKSCEPAVPFPCGRVSVSQTSKLTRAETVFPDVDYVNSTEAETILDNITQSTQSFNDFTRVVGGEDAKPGQFPWQVVLNGKVDAFCGGSIVNEKWIVTAAHCVETGVKITVVAGEHNIEETEHTEQKRNVIRIIPHSNYNAAINKYNHDIALLELDEPLVLNSYVTPICIADKEYTNIFLKFGSGYVSGWGRVFHKGRSALVLQYLRVPLVDRATCLRSTKFTIYNNMFCAGFHEGGRDSCQGDSGGPHVTEVEGTSFLTGIISWGEECAMKGKYGIYTKVSRYVNWIKEKTKLT

SEQ ID NO: 202 - protein, 415 aa, Artificial Sequence
  Factor IX T412A
YNSGKLEEFVQGNLERECMEEKCSFEEAREVFENTERTTEFWKQYVDGDQCESNPCLNGGSCKDDINSYECWCPFGFEGKNCELDVTCNIKNGRCEQFCKNSADNKVVCSCTEGYRLAENQKSCEPAVPFPCGRVSVSQTSKLTRAETVFPDVDYVNSTEAETILDNITQSTQSFNDFTRVVGGEDAKPGQFPWQVVLNGKVDAFCGGSIVNEKWIVTAAHCVETGVKITVVAGEHNIEETEHTEQKRNVIRIIPHHNYNAAINKYNHDIALLELDEPLVLNSYVTPICIADKEYTNIFLKFGSGYVSGWGRVFHKGRSALVLQYLRVPLVDRATCLRSTKFTIYNNMFCAGFHEGGRDSCQGDSGGPHVTEVEGTSFLTGIISWGEECAMKGKYGIYTKVSRYVNWIKEKAKLT

SEQ ID NO: 203 - protein, 415 aa, Artificial Sequence
  Factor IX T412V
YNSGKLEEFVQGNLERECMEEKCSFEEAREVFENTERTTEFWKQYVDGDQCESNPCLNGGSCKDDINSYECWCPFGFEGKNCELDVTCNIKNGRCEQFCKNSADNKVVCSCTEGYRLAENQKSCEPAVPFPCGRVSVSQTSKLTRAETVFPDVDYVNSTEAETILDNITQSTQSFNDFTRVVGGEDAKPGQFPWQVVLNGKVDAFCGGSIVNEKWIVTAAHCVETGVKITVVAGEHNIEETEHTEQKRNVIRIIPHHNYNAAINKYNHDIALLELDEPLVLNSYVTPICIADKEYTNIFLKFGSGYVSGWGRVFHKGRSALVLQYLRVPLVDRATCLRSTKFTIYNNMFCAGFHEGGRDSCQGDSGGPHVTEVEGTSFLTGIISWGEECAMKGKYGIYTKVSRYVNWIKEKVKLT

SEQ ID NO: 204 - protein, 415 aa, Artificial Sequence
  Factor IX E410N/T412A
YNSGKLEEFVQGNLERECMEEKCSFEEAREVFENTERTTEFWKQYVDGDQCESNPCLNGGSCKDDINSYECWCPFGFEGKNCELDVTCNIKNGRCEQFCKNSADNKVVCSCTEGYRLAENQKSCEPAVPFPCGRVSVSQTSKLTRAETVFPDVDYVNSTEAETILDNITQSTQSFNDFTRVVGGEDAKPGQFPWQVVLNGKVDAFCGGSIVNEKWIVTAAHCVETGVKITVVAGEHNIEETEHTEQKRNVIRIIPHHNYNAAINKYNHDIALLELDEPLVLNSYVTPICIADKEYTNIFLKFGSGYVSGWGRVFHKGRSALVLQYLRVPLVDRATCLRSTKFTIYNNMFCAGFHEGGRDSCQGDSGGPHVTEVEGTSFLTGIISWGEECAMKGKYGIYTKVSRYVNWIKNKAKLT

SEQ ID NO: 205 - protein, 415 aa, Artificial Sequence
  Factor IX E410N/T412V
YNSGKLEEFVQGNLERECMEEKCSFEEAREVFENTERTTEFWKQYVDGDQCESNPCLNGGSCKDDINSYECWCPFGFEGKNCELDVTCNIKNGRCEQFCKNSADNKVVCSCTEGYRLAENQKSCEPAVPFPCGRVSVSQTSKLTRAETVFPDVDYVNSTEAETILDNITQSTQSFNDFTRVVGGEDAKPGQFPWQVVLNGKVDAFCGGSIVNEKWIVTAAHCVETGVKITVVAGEHNIEETEHTEQKRNVIRIIPHHNYNAAINKYNHDIALLELDEPLVLNSYVTPICIADKEYTNIFLKFGSGYVSGWGRVFHKGRSALVLQYLRVPLVDRATCLRSTKFTIYNNMFCAGFHEGGRDSCQGDSGGPHVTEVEGTSFLTGIISWGEECAMKGKYGIYTKVSRYVNWIKNKVKLT

SEQ ID NO: 206 - protein, 415 aa, Artificial Sequence
  Factor IX E410D
YNSGKLEEFVQGNLERECMEEKCSFEEAREVFENTERTTEFWKQYVDGDQCESNPCLNGGSCKDDINSYECWCPFGFEGKNCELDVTCNIKNGRCEQFCKNSADNKVVCSCTEGYRLAENQKSCEPAVPFPCGRVSVSQTSKLTRAETVFPDVDYVNSTEAETILDNITQSTQSFNDFTRVVGGEDAKPGQFPWQVVLNGKVDAFCGGSIVNEKWIVTAAHCVETGVKITVVAGEHNIEETEHTEQKRNVIRIIPHHNYNAAINKYNHDIALLELDEPLVLNSYVTPICIADKEYTNIFLKFGSGYVSGWGRVFHKGRSALVLQYLRVPLVDRATCLRSTKFTIYNNMFCAGFHEGGRDSCQGDSGGPHVTEVEGTSFLTGIISWGEECAMKGKYGIYTKVSRYVNWIKDKTKLT

SEQ ID NO: 207 - protein, 415 aa, Artificial Sequence
  Factor IX N346D
YNSGKLEEFVQGNLERECMEEKCSFEEAREVFENTERTTEFWKQYVDGDQCESNPCLNGGSCKDDINSYECWCPFGFEGKNCELDVTCNIKNGRCEQFCKNSADNKVVCSCTEGYRLAENQKSCEPAVPFPCGRVSVSQTSKLTRAETVFPDVDYVNSTEAETILDNITQSTQSFNDFTRVVGGEDAKPGQFPWQVVLNGKVDAFCGGSIVNEKWIVTAAHCVETGVKITVVAGEHNIEETEHTEQKRNVIRIIPHHNYNAAINKYNHDIALLELDEPLVLNSYVTPICIADKEYTNIFLKFGSGYVSGWGRVFHKGRSALVLQYLRVPLVDRATCLRSTKFTIYDNMFCAGFHEGGRDSCQGDSGGPHVTEVEGTSFLTGIISWGEECAMKGKYGIYTKVSRYVNWIKEKTKLT

SEQ ID NO: 208 - protein, 415 aa, Artificial Sequence
  Factor IX N346Y
YNSGKLEEFVQGNLERECMEEKCSFEEAREVFENTERTTEFWKQYVDGDQCESNPCLNGGSCKDDINSYECWCPFGFEGKNCELDVTCNIKNGRCEQFCKNSADNKVVCSCTEGYRLAENQKSCEPAVPFPCGRVSVSQTSKLTRAETVFPDVDYVNSTEAETILDNITQSTQSFNDFTRVVGGEDAKPGQFPWQVVLNGKVDAFCGGSIVNEKWIVTAAHCVETGVKITVVAGEHNIEETEHTEQKRNVIRIIPHHNYNAAINKYNHDIALLELDEPLVLNSYVTPICIADKEYTNIFLKFGSGYVSGWGRVFHKGRSALVLQYLRVPLVDRATCLRSTKFTIYYNMFCAGFHEGGRDSCQGDSGGPHVTEVEGTSFLTGIISWGEECAMKGKYGIYTKVSRYVNWIKEKTKLT

SEQ ID NO: 209 - protein, 415 aa, Artificial Sequence
  Factor IX T343R
YNSGKLEEFVQGNLERECMEEKCSFEEAREVFENTERTTEFWKQYVDGDQCESNPCLNGGSCKDDINSYECWCPFGFEGKNCELDVTCNIKNGRCEQFCKNSADNKVVCSCTEGYRLAENQKSCEPAVPFPCGRVSVSQTSKLTRAETVFPDVDYVNSTEAETILDNITQSTQSFNDFTRVVGGEDAKPGQFPWQVVLNGKVDAFCGGSIVNEKWIVTAAHCVETGVKITVVAGEHNIEETEHTEQKRNVIRIIPHHNYNAAINKYNHDIALLELDEPLVLNSYVTPICIADKEYTNIFLKFGSGYVSGWGRVFHKGRSALVLQYLRVPLVDRATCLRSTKFRIYNNMFCAGFHEGGRDSCQGDSGGPHVTEVEGTSFLTGIISWGEECAMKGKYGIYTKVSRYVNWIKEKTKLT

SEQ ID NO: 210 - protein, 415 aa, Artificial Sequence
  Factor IX T343E
YNSGKLEEFVQGNLERECMEEKCSFEEAREVFENTERTTEFWKQYVDGDQCESNPCLNGGSCKDDINSYECWCPFGFEGKNCELDVTCNIKNGRCEQFCKNSADNKVVCSCTEGYRLAENQKSCEPAVPFPCGRVSVSQTSKLTRAETVFPDVDYVNSTEAETILDNITQSTQSFNDFTRVVGGEDAKPGQFPWQVVLNGKVDAFCGGSIVNEKWIVTAAHCVETGVKITVVAGEHNIEETEHTEQKRNVIRIIPHHNYNAAINKYNHDIALLELDEPLVLNSYVTPICIADKEYTNIFLKFGSGYVSGWGRVFHKGRSALVLQYLRVPLVDRATCLRSTKFEIYNNMFCAGFHEGGRDSCQGDSGGPHVTEVEGTSFLTGIISWGEECAMKGKYGIYTKVSRYVNWIKEKTKLT

SEQ ID NO: 211 - protein, 415 aa, Artificial Sequence
  Factor IX T343Q
YNSGKLEEFVQGNLERECMEEKCSFEEAREVFENTERTTEFWKQYVDGDQCESNPCLNGGSCKDDINSYECWCPFGFEGKNCELDVTCNIKNGRCEQFCKNSADNKVVCSCTEGYRLAENQKSCEPAVPFPCGRVSVSQTSKLTRAETVFPDVDYVNSTEAETILDNITQSTQSFNDFTRVVGGEDAKPGQFPWQVVLNGKVDAFCGGSIVNEKWIVTAAHCVETGVKITVVAGEHNIEETEHTEQKRNVIRIIPHHNYNAAINKYNHDIALLELDEPLVLNSYVTPICIADKEYTNIFLKFGSGYVSGWGRVFHKGRSALVLQYLRVPLVDRATCLRSTKFQIYNNMFCAGFHEGGRDSCQGDSGGPHVTEVEGTSFLTGIISWGEECAMKGKYGIYTKVSRYVNWIKEKTKLT

SEQ ID NO: 212 - protein, 415 aa, Artificial Sequence
  Factor IX F342I
YNSGKLEEFVQGNLERECMEEKCSFEEAREVFENTERTTEFWKQYVDGDQCESNPCLNGGSCKDDINSYECWCPFGFEGKNCELDVTCNIKNGRCEQFCKNSADNKVVCSCTEGYRLAENQKSCEPAVPFPCGRVSVSQTSKLTRAETVFPDVDYVNSTEAETILDNITQSTQSFNDFTRVVGGEDAKPGQFPWQVVLNGKVDAFCGGSIVNEKWIVTAAHCVETGVKITVVAGEHNIEETEHTEQKRNVIRIIPHHNYNAAINKYNHDIALLELDEPLVLNSYVTPICIADKEYTNIFLKFGSGYVSGWGRVFHKGRSALVLQYLRVPLVDRATCLRSTKITIYNNMFCAGFHEGGRDSCQGDSGGPHVTEVEGTSFLTGIISWGEECAMKGKYGIYTKVSRYVNWIKEKTKLT

SEQ ID NO: 213 - protein, 415 aa, Artificial Sequence
  Factor IX Y345A
YNSGKLEEFVQGNLERECMEEKCSFEEAREVFENTERTTEFWKQYVDGDQCESNPCLNGGSCKDDINSYECWCPFGFEGKNCELDVTCNIKNGRCEQFCKNSADNKVVCSCTEGYRLAENQKSCEPAVPFPCGRVSVSQTSKLTRAETVFPDVDYVNSTEAETILDNITQSTQSFNDFTRVVGGEDAKPGQFPWQVVLNGKVDAFCGGSIVNEKWIVTAAHCVETGVKITVVAGEHNIEETEHTEQKRNVIRIIPHHNYNAAINKYNHDIALLELDEPLVLNSYVTPICIADKEYTNIFLKFGSGYVSGWGRVFHKGRSALVLQYLRVPLVDRATCLRSTKFTIANNMFCAGFHEGGRDSCQGDSGGPHVTEVEGTSFLTGIISWGEECAMKGKYGIYTKVSRYVNWIKEKTKLT

SEQ ID NO: 214 - protein, 415 aa, Artificial Sequence
  Factor IX Y345T
YNSGKLEEFVQGNLERECMEEKCSFEEAREVFENTERTTEFWKQYVDGDQCESNPCLNGGSCKDDINSYECWCPFGFEGKNCELDVTCNIKNGRCEQFCKNSADNKVVCSCTEGYRLAENQKSCEPAVPFPCGRVSVSQTSKLTRAETVFPDVDYVNSTEAETILDNITQSTQSFNDFTRVVGGEDAKPGQFPWQVVLNGKVDAFCGGSIVNEKWIVTAAHCVETGVKITVVAGEHNIEETEHTEQKRNVIRIIPHHNYNAAINKYNHDIALLELDEPLVLNSYVTPICIADKEYTNIFLKFGSGYVSGWGRVFHKGRSALVLQYLRVPLVDRATCLRSTKFTITNNMFCAGFHEGGRDSCQGDSGGPHVTEVEGTSFLTGIISWGEECAMKGKYGIYTKVSRYVNWIKEKTKLT

SEQ ID NO: 215 - protein, 415 aa, Artificial Sequence
  Factor IX T343R/Y345T
YNSGKLEEFVQGNLERECMEEKCSFEEAREVFENTERTTEFWKQYVDGDQCESNPCLNGGSCKDDINSYECWCPFGFEGKNCELDVTCNIKNGRCEQFCKNSADNKVVCSCTEGYRLAENQKSCEPAVPFPCGRVSVSQTSKLTRAETVFPDVDYVNSTEAETILDNITQSTQSFNDFTRVVGGEDAKPGQFPWQVVLNGKVDAFCGGSIVNEKWIVTAAHCVETGVKITVVAGEHNIEETEHTEQKRNVIRIIPHHNYNAAINKYNHDIALLELDEPLVLNSYVTPICIADKEYTNIFLKFGSGYVSGWGRVFHKGRSALVLQYLRVPLVDRATCLRSTKFRITNNMFCAGFHEGGRDSCQGDSGGPHVTEVEGTSFLTGIISWGEECAMKGKYGIYTKVSRYVNWIKEKTKLT

SEQ ID NO: 216 - protein, 415 aa, Artificial Sequence
  Factor IX Y259F/K265T/Y345T
YNSGKLEEFVQGNLERECMEEKCSFEEAREVFENTERTTEFWKQYVDGDQCESNPCLNGGSCKDDINSYECWCPFGFEGKNCELDVTCNIKNGRCEQFCKNSADNKVVCSCTEGYRLAENQKSCEPAVPFPCGRVSVSQTSKLTRAETVFPDVDYVNSTEAETILDNITQSTQSFNDFTRVVGGEDAKPGQFPWQVVLNGKVDAFCGGSIVNEKWIVTAAHCVETGVKITVVAGEHNIEETEHTEQKRNVIRIIPHHNFNAAINTYNHDIALLELDEPLVLNSYVTPICIADKEYTNIFLKFGSGYVSGWGRVFHKGRSALVLQYLRVPLVDRATCLRSTKFTITNNMFCAGFHEGGRDSCQGDSGGPHVTEVEGTSFLTGIISWGEECAMKGKYGIYTKVSRYVNWIKEKTKLT

SEQ ID NO: 217 - protein, 415 aa, Artificial Sequence
  Factor IX A103N/N105S/K228N
YNSGKLEEFVQGNLERECMEEKCSFEEAREVFENTERTTEFWKQYVDGDQCESNPCLNGGSCKDDINSYECWCPFGFEGKNCELDVTCNIKNGRCEQFCKNSNDSKVVCSCTEGYRLAENQKSCEPAVPFPCGRVSVSQTSKLTRAETVFPDVDYVNSTEAETILDNITQSTQSFNDFTRVVGGEDAKPGQFPWQVVLNGKVDAFCGGSIVNEKWIVTAAHCVETGVNITVVAGEHNIEETEHTEQKRNVIRIIPHHNYNAAINKYNHDIALLELDEPLVLNSYVTPICIADKEYTNIFLKFGSGYVSGWGRVFHKGRSALVLQYLRVPLVDRATCLRSTKFTIYNNMFCAGFHEGGRDSCQGDSGGPHVTEVEGTSFLTGIISWGEECAMKGKYGIYTKVSRYVNWIKEKTKLT

SEQ ID NO: 218 - protein, 415 aa, Artificial Sequence
  Factor IX D104N/K106S/K228N
YNSGKLEEFVQGNLERECMEEKCSFEEAREVFENTERTTEFWKQYVDGDQCESNPCLNGGSCKDDINSYECWCPFGFEGKNCELDVTCNIKNGRCEQFCKNSANNSVVCSCTEGYRLAENQKSCEPAVPFPCGRVSVSQTSKLTRAETVFPDVDYVNSTEAETILDNITQSTQSFNDFTRVVGGEDAKPGQFPWQVVLNGKVDAFCGGSIVNEKWIVTAAHCVETGVNITVVAGEHNIEETEHTEQKRNVIRIIPHHNYNAAINKYNHDIALLELDEPLVLNSYVTPICIADKEYTNIFLKFGSGYVSGWGRVFHKGRSALVLQYLRVPLVDRATCLRSTKFTIYNNMFCAGFHEGGRDSCQGDSGGPHVTEVEGTSFLTGIISWGEECAMKGKYGIYTKVSRYVNWIKEKTKLT

SEQ ID NO: 219 - protein, 415 aa, Artificial Sequence
  Factor IX A103N/N105S/R318Y/R338E/R403E/E410N
YNSGKLEEFVQGNLERECMEEKCSFEEAREVFENTERTTEFWKQYVDGDQCESNPCLNGGSCKDDINSYECWCPFGFEGKNCELDVTCNIKNGRCEQFCKNSNDSKVVCSCTEGYRLAENQKSCEPAVPFPCGRVSVSQTSKLTRAETVFPDVDYVNSTEAETILDNITQSTQSFNDFTRVVGGEDAKPGQFPWQVVLNGKVDAFCGGSIVNEKWIVTAAHCVETGVKITVVAGEHNIEETEHTEQKRNVIRIIPHHNYNAAINKYNHDIALLELDEPLVLNSYVTPICIADKEYTNIFLKFGSGYVSGWGRVFHKGYSALVLQYLRVPLVDRATCLESTKFTIYNNMFCAGFHEGGRDSCQGDSGGPHVTEVEGTSFLTGIISWGEECAMKGKYGIYTKVSEYVNWIKNKTKLT

SEQ ID NO: 220 - protein, 415 aa, Artificial Sequence
  Factor IX D104N/K106S/R318Y/R338E/R403E/E410N
YNSGKLEEFVQGNLERECMEEKCSFEEAREVFENTERTTEFWKQYVDGDQCESNPCLNGGSCKDDINSYECWCPFGFEGKNCELDVTCNIKNGRCEQFCKNSANNSVVCSCTEGYRLAENQKSCEPAVPFPCGRVSVSQTSKLTRAETVFPDVDYVNSTEAETILDNITQSTQSFNDFTRVVGGEDAKPGQFPWQVVLNGKVDAFCGGSIVNEKWIVTAAHCVETGVKITVVAGEHNIEETEHTEQKRNVIRIIPHHNYNAAINKYNHDIALLELDEPLVLNSYVTPICIADKEYTNIFLKFGSGYVSGWGRVFHKGYSALVLQYLRVPLVDRATCLESTKFTIYNNMFCAGFHEGGRDSCQGDSGGPHVTEVEGTSFLTGIISWGEECAMKGKYGIYTKVSEYVNWIKNKTKLT

SEQ ID NO: 221 - protein, 415 aa, Artificial Sequence
  Factor IX K228N/R318Y/R338E/R403E/E410N
YNSGKLEEFVQGNLERECMEEKCSFEEAREVFENTERTTEFWKQYVDGDQCESNPCLNGGSCKDDINSYECWCPFGFEGKNCELDVTCNIKNGRCEQFCKNSADNKVVCSCTEGYRLAENQKSCEPAVPFPCGRVSVSQTSKLTRAETVFPDVDYVNSTEAETILDNITQSTQSFNDFTRVVGGEDAKPGQFPWQVVLNGKVDAFCGGSIVNEKWIVTAAHCVETGVNITVVAGEHNIEETEHTEQKRNVIRIIPHHNYNAAINKYNHDIALLELDEPLVLNSYVTPICIADKEYTNIFLKFGSGYVSGWGRVFHKGYSALVLQYLRVPLVDRATCLESTKFTIYNNMFCAGFHEGGRDSCQGDSGGPHVTEVEGTSFLTGIISWGEECAMKGKYGIYTKVSEYVNWIKNKTKLT

SEQ ID NO: 222 - protein, 415 aa, Artificial Sequence
  Factor IX I251S/R318Y/R338E/R403E/E410N
YNSGKLEEFVQGNLERECMEEKCSFEEAREVFENTERTTEFWKQYVDGDQCESNPCLNGGSCKDDINSYECWCPFGFEGKNCELDVTCNIKNGRCEQFCKNSADNKVVCSCTEGYRLAENQKSCEPAVPFPCGRVSVSQTSKLTRAETVFPDVDYVNSTEAETILDNITQSTQSFNDFTRVVGGEDAKPGQFPWQVVLNGKVDAFCGGSIVNEKWIVTAAHCVETGVKITVVAGEHNIEETEHTEQKRNVSRIIPHHNYNAAINKYNHDIALLELDEPLVLNSYVTPICIADKEYTNIFLKFGSGYVSGWGRVFHKGYSALVLQYLRVPLVDRATCLESTKFTIYNNMFCAGFHEGGRDSCQGDSGGPHVTEVEGTSFLTGIISWGEECAMKGKYGIYTKVSEYVNWIKNKTKLT

SEQ ID NO: 223 - protein, 415 aa, Artificial Sequence
  Factor IX D104N/K106S/I251S/R318Y/R338E/R403E/E410N
YNSGKLEEFVQGNLERECMEEKCSFEEAREVFENTERTTEFWKQYVDGDQCESNPCLNGGSCKDDINSYECWCPFGFEGKNCELDVTCNIKNGRCEQFCKNSANNSVVCSCTEGYRLAENQKSCEPAVPFPCGRVSVSQTSKLTRAETVFPDVDYVNSTEAETILDNITQSTQSFNDFTRVVGGEDAKPGQFPWQVVLNGKVDAFCGGSIVNEKWIVTAAHCVETGVKITVVAGEHNIEETEHTEQKRNVSRIIPHHNYNAAINKYNHDIALLELDEPLVLNSYVTPICIADKEYTNIFLKFGSGYVSGWGRVFHKGYSALVLQYLRVPLVDRATCLESTKFTIYNNMFCAGFHEGGRDSCQGDSGGPHVTEVEGTSFLTGIISWGEECAMKGKYGIYTKVSEYVNWIKNKTKLT

SEQ ID NO: 224 - protein, 415 aa, Artificial Sequence
  Factor IX D104N/K106S/R318Y/R338E/E410N
YNSGKLEEFVQGNLERECMEEKCSFEEAREVFENTERTTEFWKQYVDGDQCESNPCLNGGSCKDDINSYECWCPFGFEGKNCELDVTCNIKNGRCEQFCKNSANNSVVCSCTEGYRLAENQKSCEPAVPFPCGRVSVSQTSKLTRAETVFPDVDYVNSTEAETILDNITQSTQSFNDFTRVVGGEDAKPGQFPWQVVLNGKVDAFCGGSIVNEKWIVTAAHCVETGVKITVVAGEHNIEETEHTEQKRNVIRIIPHHNYNAAINKYNHDIALLELDEPLVLNSYVTPICIADKEYTNIFLKFGSGYVSGWGRVFHKGYSALVLQYLRVPLVDRATCLESTKFTIYNNMFCAGFHEGGRDSCQGDSGGPHVTEVEGTSFLTGIISWGEECAMKGKYGIYTKVSRYVNWIKNKTKLT

SEQ ID NO: 225 - protein, 415 aa, Artificial Sequence
  Factor IX I251S/R318Y/R338E/E410N
YNSGKLEEFVQGNLERECMEEKCSFEEAREVFENTERTTEFWKQYVDGDQCESNPCLNGGSCKDDINSYECWCPFGFEGKNCELDVTCNIKNGRCEQFCKNSADNKVVCSCTEGYRLAENQKSCEPAVPFPCGRVSVSQTSKLTRAETVFPDVDYVNSTEAETILDNITQSTQSFNDFTRVVGGEDAKPGQFPWQVVLNGKVDAFCGGSIVNEKWIVTAAHCVETGVKITVVAGEHNIEETEHTEQKRNVSRIIPHHNYNAAINKYNHDIALLELDEPLVLNSYVTPICIADKEYTNIFLKFGSGYVSGWGRVFHKGYSALVLQYLRVPLVDRATCLESTKFTIYNNMFCAGFHEGGRDSCQGDSGGPHVTEVEGTSFLTGIISWGEECAMKGKYGIYTKVSRYVNWIKNKTKLT

SEQ ID NO: 226 - protein, 415 aa, Artificial Sequence
  Factor IX D104N/K106S/I251S/R318Y/R338E/E410N
YNSGKLEEFVQGNLERECMEEKCSFEEAREVFENTERTTEFWKQYVDGDQCESNPCLNGGSCKDDINSYECWCPFGFEGKNCELDVTCNIKNGRCEQFCKNSANNSVVCSCTEGYRLAENQKSCEPAVPFPCGRVSVSQTSKLTRAETVFPDVDYVNSTEAETILDNITQSTQSFNDFTRVVGGEDAKPGQFPWQVVLNGKVDAFCGGSIVNEKWIVTAAHCVETGVKITVVAGEHNIEETEHTEQKRNVSRIIPHHNYNAAINKYNHDIALLELDEPLVLNSYVTPICIADKEYTNIFLKFGSGYVSGWGRVFHKGYSALVLQYLRVPLVDRATCLESTKFTIYNNMFCAGFHEGGRDSCQGDSGGPHVTEVEGTSFLTGIISWGEECAMKGKYGIYTKVSRYVNWIKNKTKLT

SEQ ID NO: 227 - protein, 415 aa, Artificial Sequence
  Factor IX A103N/N105S/Y155F
YNSGKLEEFVQGNLERECMEEKCSFEEAREVFENTERTTEFWKQYVDGDQCESNPCLNGGSCKDDINSYECWCPFGFEGKNCELDVTCNIKNGRCEQFCKNSNDSKVVCSCTEGYRLAENQKSCEPAVPFPCGRVSVSQTSKLTRAETVFPDVDFVNSTEAETILDNITQSTQSFNDFTRVVGGEDAKPGQFPWQVVLNGKVDAFCGGSIVNEKWIVTAAHCVETGVKITVVAGEHNIEETEHTEQKRNVIRIIPHHNYNAAINKYNHDIALLELDEPLVLNSYVTPICIADKEYTNIFLKFGSGYVSGWGRVFHKGRSALVLQYLRVPLVDRATCLRSTKFTIYNNMFCAGFHEGGRDSCQGDSGGPHVTEVEGTSFLTGIISWGEECAMKGKYGIYTKVSRYVNWIKEKTKLT

SEQ ID NO: 228 - protein, 415 aa, Artificial Sequence
  Factor IX D104N/K106S/Y155F
YNSGKLEEFVQGNLERECMEEKCSFEEAREVFENTERTTEFWKQYVDGDQCESNPCLNGGSCKDDINSYECWCPFGFEGKNCELDVTCNIKNGRCEQFCKNSANNSVVCSCTEGYRLAENQKSCEPAVPFPCGRVSVSQTSKLTRAETVFPDVDFVNSTEAETILDNITQSTQSFNDFTRVVGGEDAKPGQFPWQVVLNGKVDAFCGGSIVNEKWIVTAAHCVETGVKITVVAGEHNIEETEHTEQKRNVIRIIPHHNYNAAINKYNHDIALLELDEPLVLNSYVTPICIADKEYTNIFLKFGSGYVSGWGRVFHKGRSALVLQYLRVPLVDRATCLRSTKFTIYNNMFCAGFHEGGRDSCQGDSGGPHVTEVEGTSFLTGIISWGEECAMKGKYGIYTKVSRYVNWIKEKTKLT

SEQ ID NO: 229 - protein, 415 aa, Artificial Sequence
  Factor IX Y155F/K228N
YNSGKLEEFVQGNLERECMEEKCSFEEAREVFENTERTTEFWKQYVDGDQCESNPCLNGGSCKDDINSYECWCPFGFEGKNCELDVTCNIKNGRCEQFCKNSADNKVVCSCTEGYRLAENQKSCEPAVPFPCGRVSVSQTSKLTRAETVFPDVDFVNSTEAETILDNITQSTQSFNDFTRVVGGEDAKPGQFPWQVVLNGKVDAFCGGSIVNEKWIVTAAHCVETGVNITVVAGEHNIEETEHTEQKRNVIRIIPHHNYNAAINKYNHDIALLELDEPLVLNSYVTPICIADKEYTNIFLKFGSGYVSGWGRVFHKGRSALVLQYLRVPLVDRATCLRSTKFTIYNNMFCAGFHEGGRDSCQGDSGGPHVTEVEGTSFLTGIISWGEECAMKGKYGIYTKVSRYVNWIKEKTKLT

SEQ ID NO: 230 - protein, 415 aa, Artificial Sequence
  Factor IX Y155F/I251S
YNSGKLEEFVQGNLERECMEEKCSFEEAREVFENTERTTEFWKQYVDGDQCESNPCLNGGSCKDDINSYECWCPFGFEGKNCELDVTCNIKNGRCEQFCKNSADNKVVCSCTEGYRLAENQKSCEPAVPFPCGRVSVSQTSKLTRAETVFPDVDFVNSTEAETILDNITQSTQSFNDFTRVVGGEDAKPGQFPWQVVLNGKVDAFCGGSIVNEKWIVTAAHCVETGVKITVVAGEHNIEETEHTEQKRNVSRIIPHHNYNAAINKYNHDIALLELDEPLVLNSYVTPICIADKEYTNIFLKFGSGYVSGWGRVFHKGRSALVLQYLRVPLVDRATCLRSTKFTIYNNMFCAGFHEGGRDSCQGDSGGPHVTEVEGTSFLTGIISWGEECAMKGKYGIYTKVSRYVNWIKEKTKLT

SEQ ID NO: 231 - protein, 415 aa, Artificial Sequence
  Factor IX Y155F/K247N/N249S
YNSGKLEEFVQGNLERECMEEKCSFEEAREVFENTERTTEFWKQYVDGDQCESNPCLNGGSCKDDINSYECWCPFGFEGKNCELDVTCNIKNGRCEQFCKNSADNKVVCSCTEGYRLAENQKSCEPAVPFPCGRVSVSQTSKLTRAETVFPDVDFVNSTEAETILDNITQSTQSFNDFTRVVGGEDAKPGQFPWQVVLNGKVDAFCGGSIVNEKWIVTAAHCVETGVKITVVAGEHNIEETEHTEQNRSVIRIIPHHNYNAAINKYNHDIALLELDEPLVLNSYVTPICIADKEYTNIFLKFGSGYVSGWGRVFHKGRSALVLQYLRVPLVDRATCLRSTKFTIYNNMFCAGFHEGGRDSCQGDSGGPHVTEVEGTSFLTGIISWGEECAMKGKYGIYTKVSRYVNWIKEKTKLT

SEQ ID NO: 232 - protein, 415 aa, Artificial Sequence
  Factor IX A103N/N105S/K247N/N249S/R318Y/R338E/R403E/E410N
YNSGKLEEFVQGNLERECMEEKCSFEEAREVFENTERTTEFWKQYVDGDQCESNPCLNGGSCKDDINSYECWCPFGFEGKNCELDVTCNIKNGRCEQFCKNSNDSKVVCSCTEGYRLAENQKSCEPAVPFPCGRVSVSQTSKLTRAETVFPDVDYVNSTEAETILDNITQSTQSFNDFTRVVGGEDAKPGQFPWQVVLNGKVDAFCGGSIVNEKWIVTAAHCVETGVKITVVAGEHNIEETEHTEQNRSVIRIIPHHNYNAAINKYNHDIALLELDEPLVLNSYVTPICIADKEYTNIFLKFGSGYVSGWGRVFHKGYSALVLQYLRVPLVDRATCLESTKFTIYNNMFCAGFHEGGRDSCQGDSGGPHVTEVEGTSFLTGIISWGEECAMKGKYGIYTKVSEYVNWIKNKTKLT

SEQ ID NO: 233 - protein, 415 aa, Artificial Sequence
  Factor IX D104N/K106S/K247N/N249S/R318Y/R338E/R403E/E410N
YNSGKLEEFVQGNLERECMEEKCSFEEAREVFENTERTTEFWKQYVDGDQCESNPCLNGGSCKDDINSYECWCPFGFEGKNCELDVTCNIKNGRCEQFCKNSANNSVVCSCTEGYRLAENQKSCEPAVPFPCGRVSVSQTSKLTRAETVFPDVDYVNSTEAETILDNITQSTQSFNDFTRVVGGEDAKPGQFPWQVVLNGKVDAFCGGSIVNEKWIVTAAHCVETGVKITVVAGEHNIEETEHTEQNRSVIRIIPHHNYNAAINKYNHDIALLELDEPLVLNSYVTPICIADKEYTNIFLKFGSGYVSGWGRVFHKGYSALVLQYLRVPLVDRATCLESTKFTIYNNMFCAGFHEGGRDSCQGDSGGPHVTEVEGTSFLTGIISWGEECAMKGKYGIYTKVSEYVNWIKNKTKLT

SEQ ID NO: 234 - protein, 415 aa, Artificial Sequence
  Factor IX K228N/K247N/N249S/R318Y/R338E/R403E/E410N
YNSGKLEEFVQGNLERECMEEKCSFEEAREVFENTERTTEFWKQYVDGDQCESNPCLNGGSCKDDINSYECWCPFGFEGKNCELDVTCNIKNGRCEQFCKNSADNKVVCSCTEGYRLAENQKSCEPAVPFPCGRVSVSQTSKLTRAETVFPDVDYVNSTEAETILDNITQSTQSFNDFTRVVGGEDAKPGQFPWQVVLNGKVDAFCGGSIVNEKWIVTAAHCVETGVNITVVAGEHNIEETEHTEQNRSVIRIIPHHNYNAAINKYNHDIALLELDEPLVLNSYVTPICIADKEYTNIFLKFGSGYVSGWGRVFHKGYSALVLQYLRVPLVDRATCLESTKFTIYNNMFCAGFHEGGRDSCQGDSGGPHVTEVEGTSFLTGIISWGEECAMKGKYGIYTKVSEYVNWIKNKTKLT

SEQ ID NO: 235 - protein, 415 aa, Artificial Sequence
  Factor IX A103N/N105S/Y155F/R318Y/R338E/R403E/E410N
YNSGKLEEFVQGNLERECMEEKCSFEEAREVFENTERTTEFWKQYVDGDQCESNPCLNGGSCKDDINSYECWCPFGFEGKNCELDVTCNIKNGRCEQFCKNSNDSKVVCSCTEGYRLAENQKSCEPAVPFPCGRVSVSQTSKLTRAETVFPDVDFVNSTEAETILDNITQSTQSFNDFTRVVGGEDAKPGQFPWQVVLNGKVDAFCGGSIVNEKWIVTAAHCVETGVKITVVAGEHNIEETEHTEQKRNVIRIIPHHNYNAAINKYNHDIALLELDEPLVLNSYVTPICIADKEYTNIFLKFGSGYVSGWGRVFHKGYSALVLQYLRVPLVDRATCLESTKFTIYNNMFCAGFHEGGRDSCQGDSGGPHVTEVEGTSFLTGIISWGEECAMKGKYGIYTKVSEYVNWIKNKTKLT

SEQ ID NO: 236 - protein, 415 aa, Artificial Sequence
  Factor IX D104N/K106S/Y155F/R318Y/R338E/R403E/E410N
YNSGKLEEFVQGNLERECMEEKCSFEEAREVFENTERTTEFWKQYVDGDQCESNPCLNGGSCKDDINSYECWCPFGFEGKNCELDVTCNIKNGRCEQFCKNSANNSVVCSCTEGYRLAENQKSCEPAVPFPCGRVSVSQTSKLTRAETVFPDVDFVNSTEAETILDNITQSTQSFNDFTRVVGGEDAKPGQFPWQVVLNGKVDAFCGGSIVNEKWIVTAAHCVETGVKITVVAGEHNIEETEHTEQKRNVIRIIPHHNYNAAINKYNHDIALLELDEPLVLNSYVTPICIADKEYTNIFLKFGSGYVSGWGRVFHKGYSALVLQYLRVPLVDRATCLESTKFTIYNNMFCAGFHEGGRDSCQGDSGGPHVTEVEGTSFLTGIISWGEECAMKGKYGIYTKVSEYVNWIKNKTKLT

SEQ ID NO: 237 - protein, 415 aa, Artificial Sequence
  Factor IX Y155F/K228N/R318Y/R338E/R403E/E410N
YNSGKLEEFVQGNLERECMEEKCSFEEAREVFENTERTTEFWKQYVDGDQCESNPCLNGGSCKDDINSYECWCPFGFEGKNCELDVTCNIKNGRCEQFCKNSADNKVVCSCTEGYRLAENQKSCEPAVPFPCGRVSVSQTSKLTRAETVFPDVDFVNSTEAETILDNITQSTQSFNDFTRVVGGEDAKPGQFPWQVVLNGKVDAFCGGSIVNEKWIVTAAHCVETGVNITVVAGEHNIEETEHTEQKRNVIRIIPHHNYNAAINKYNHDIALLELDEPLVLNSYVTPICIADKEYTNIFLKFGSGYVSGWGRVFHKGYSALVLQYLRVPLVDRATCLESTKFTIYNNMFCAGFHEGGRDSCQGDSGGPHVTEVEGTSFLTGIISWGEECAMKGKYGIYTKVSEYVNWIKNKTKLT

SEQ ID NO: 238 - protein, 415 aa, Artificial Sequence
  Factor IX Y155F/I251S/R318Y/R338E/R403E/E410N
YNSGKLEEFVQGNLERECMEEKCSFEEAREVFENTERTTEFWKQYVDGDQCESNPCLNGGSCKDDINSYECWCPFGFEGKNCELDVTCNIKNGRCEQFCKNSADNKVVCSCTEGYRLAENQKSCEPAVPFPCGRVSVSQTSKLTRAETVFPDVDFVNSTEAETILDNITQSTQSFNDFTRVVGGEDAKPGQFPWQVVLNGKVDAFCGGSIVNEKWIVTAAHCVETGVKITVVAGEHNIEETEHTEQKRNVSRIIPHHNYNAAINKYNHDIALLELDEPLVLNSYVTPICIADKEYTNIFLKFGSGYVSGWGRVFHKGYSALVLQYLRVPLVDRATCLESTKFTIYNNMFCAGFHEGGRDSCQGDSGGPHVTEVEGTSFLTGIISWGEECAMKGKYGIYTKVSEYVNWIKNKTKLT

SEQ ID NO: 239 - protein, 415 aa, Artificial Sequence
  Factor IX Y155F/K247N/N249S/R318Y/R338E/R403E/E410N
YNSGKLEEFVQGNLERECMEEKCSFEEAREVFENTERTTEFWKQYVDGDQCESNPCLNGGSCKDDINSYECWCPFGFEGKNCELDVTCNIKNGRCEQFCKNSADNKVVCSCTEGYRLAENQKSCEPAVPFPCGRVSVSQTSKLTRAETVFPDVDFVNSTEAETILDNITQSTQSFNDFTRVVGGEDAKPGQFPWQVVLNGKVDAFCGGSIVNEKWIVTAAHCVETGVKITVVAGEHNIEETEHTEQNRSVIRIIPHHNYNAAINKYNHDIALLELDEPLVLNSYVTPICIADKEYTNIFLKFGSGYVSGWGRVFHKGYSALVLQYLRVPLVDRATCLESTKFTIYNNMFCAGFHEGGRDSCQGDSGGPHVTEVEGTSFLTGIISWGEECAMKGKYGIYTKVSEYVNWIKNKTKLT

SEQ ID NO: 240 - protein, 415 aa, Artificial Sequence
  Factor IX K247N/N249S/R318Y/R338E/R403E/E410N
YNSGKLEEFVQGNLERECMEEKCSFEEAREVFENTERTTEFWKQYVDGDQCESNPCLNGGSCKDDINSYECWCPFGFEGKNCELDVTCNIKNGRCEQFCKNSADNKVVCSCTEGYRLAENQKSCEPAVPFPCGRVSVSQTSKLTRAETVFPDVDYVNSTEAETILDNITQSTQSFNDFTRVVGGEDAKPGQFPWQVVLNGKVDAFCGGSIVNEKWIVTAAHCVETGVKITVVAGEHNIEETEHTEQNRSVIRIIPHHNYNAAINKYNHDIALLELDEPLVLNSYVTPICIADKEYTNIFLKFGSGYVSGWGRVFHKGYSALVLQYLRVPLVDRATCLESTKFTIYNNMFCAGFHEGGRDSCQGDSGGPHVTEVEGTSFLTGIISWGEECAMKGKYGIYTKVSEYVNWIKNKTKLT

SEQ ID NO: 241 - protein, 415 aa, Artificial Sequence
  Factor IX Y155F/R318Y/R338E/R403E/E410N
YNSGKLEEFVQGNLERECMEEKCSFEEAREVFENTERTTEFWKQYVDGDQCESNPCLNGGSCKDDINSYECWCPFGFEGKNCELDVTCNIKNGRCEQFCKNSADNKVVCSCTEGYRLAENQKSCEPAVPFPCGRVSVSQTSKLTRAETVFPDVDFVNSTEAETILDNITQSTQSFNDFTRVVGGEDAKPGQFPWQVVLNGKVDAFCGGSIVNEKWIVTAAHCVETGVKITVVAGEHNIEETEHTEQKRNVIRIIPHHNYNAAINKYNHDIALLELDEPLVLNSYVTPICIADKEYTNIFLKFGSGYVSGWGRVFHKGYSALVLQYLRVPLVDRATCLESTKFTIYNNMFCAGFHEGGRDSCQGDSGGPHVTEVEGTSFLTGIISWGEECAMKGKYGIYTKVSEYVNWIKNKTKLT

SEQ ID NO: 242 - protein, 415 aa, Artificial Sequence
  Factor IX K247N/N249S/R318Y/R338E/E410N
YNSGKLEEFVQGNLERECMEEKCSFEEAREVFENTERTTEFWKQYVDGDQCESNPCLNGGSCKDDINSYECWCPFGFEGKNCELDVTCNIKNGRCEQFCKNSADNKVVCSCTEGYRLAENQKSCEPAVPFPCGRVSVSQTSKLTRAETVFPDVDYVNSTEAETILDNITQSTQSFNDFTRVVGGEDAKPGQFPWQVVLNGKVDAFCGGSIVNEKWIVTAAHCVETGVKITVVAGEHNIEETEHTEQNRSVIRIIPHHNYNAAINKYNHDIALLELDEPLVLNSYVTPICIADKEYTNIFLKFGSGYVSGWGRVFHKGYSALVLQYLRVPLVDRATCLESTKFTIYNNMFCAGFHEGGRDSCQGDSGGPHVTEVEGTSFLTGIISWGEECAMKGKYGIYTKVSRYVNWIKNKTKLT

SEQ ID NO: 243 - protein, 415 aa, Artificial Sequence
  Factor IX Y155F/R318Y/R338E/E410N
YNSGKLEEFVQGNLERECMEEKCSFEEAREVFENTERTTEFWKQYVDGDQCESNPCLNGGSCKDDINSYECWCPFGFEGKNCELDVTCNIKNGRCEQFCKNSADNKVVCSCTEGYRLAENQKSCEPAVPFPCGRVSVSQTSKLTRAETVFPDVDFVNSTEAETILDNITQSTQSFNDFTRVVGGEDAKPGQFPWQVVLNGKVDAFCGGSIVNEKWIVTAAHCVETGVKITVVAGEHNIEETEHTEQKRNVIRIIPHHNYNAAINKYNHDIALLELDEPLVLNSYVTPICIADKEYTNIFLKFGSGYVSGWGRVFHKGYSALVLQYLRVPLVDRATCLESTKFTIYNNMFCAGFHEGGRDSCQGDSGGPHVTEVEGTSFLTGIISWGEECAMKGKYGIYTKVSRYVNWIKNKTKLT

SEQ ID NO: 244 - protein, 415 aa, Artificial Sequence
  Factor IX Y155F/K247N/N249S/R318Y/R338E/E410N
YNSGKLEEFVQGNLERECMEEKCSFEEAREVFENTERTTEFWKQYVDGDQCESNPCLNGGSCKDDINSYECWCPFGFEGKNCELDVTCNIKNGRCEQFCKNSADNKVVCSCTEGYRLAENQKSCEPAVPFPCGRVSVSQTSKLTRAETVFPDVDFVNSTEAETILDNITQSTQSFNDFTRVVGGEDAKPGQFPWQVVLNGKVDAFCGGSIVNEKWIVTAAHCVETGVKITVVAGEHNIEETEHTEQNRSVIRIIPHHNYNAAINKYNHDIALLELDEPLVLNSYVTPICIADKEYTNIFLKFGSGYVSGWGRVFHKGYSALVLQYLRVPLVDRATCLESTKFTIYNNMFCAGFHEGGRDSCQGDSGGPHVTEVEGTSFLTGIISWGEECAMKGKYGIYTKVSRYVNWIKNKTKLT

SEQ ID NO: 245 - protein, 415 aa, Artificial Sequence
  Factor IX D104N/K106S/Y155F/K228N/K247N/N249S
YNSGKLEEFVQGNLERECMEEKCSFEEAREVFENTERTTEFWKQYVDGDQCESNPCLNGGSCKDDINSYECWCPFGFEGKNCELDVTCNIKNGRCEQFCKNSANNSVVCSCTEGYRLAENQKSCEPAVPFPCGRVSVSQTSKLTRAETVFPDVDFVNSTEAETILDNITQSTQSFNDFTRVVGGEDAKPGQFPWQVVLNGKVDAFCGGSIVNEKWIVTAAHCVETGVNITVVAGEHNIEETEHTEQNRSVIRIIPHHNYNAAINKYNHDIALLELDEPLVLNSYVTPICIADKEYTNIFLKFGSGYVSGWGRVFHKGRSALVLQYLRVPLVDRATCLRSTKFTIYNNMFCAGFHEGGRDSCQGDSGGPHVTEVEGTSFLTGIISWGEECAMKGKYGIYTKVSRYVNWIKEKTKLT

SEQ ID NO: 246 - protein, 415 aa, Artificial Sequence
  Factor IX D104N/K106S/Y155F/K247N/N249S
YNSGKLEEFVQGNLERECMEEKCSFEEAREVFENTERTTEFWKQYVDGDQCESNPCLNGGSCKDDINSYECWCPFGFEGKNCELDVTCNIKNGRCEQFCKNSANNSVVCSCTEGYRLAENQKSCEPAVPFPCGRVSVSQTSKLTRAETVFPDVDFVNSTEAETILDNITQSTQSFNDFTRVVGGEDAKPGQFPWQVVLNGKVDAFCGGSIVNEKWIVTAAHCVETGVKITVVAGEHNIEETEHTEQNRSVIRIIPHHNYNAAINKYNHDIALLELDEPLVLNSYVTPICIADKEYTNIFLKFGSGYVSGWGRVFHKGRSALVLQYLRVPLVDRATCLRSTKFTIYNNMFCAGFHEGGRDSCQGDSGGPHVTEVEGTSFLTGIISWGEECAMKGKYGIYTKVSRYVNWIKEKTKLT

SEQ ID NO: 247 - protein, 415 aa, Artificial Sequence
  Factor IX D104N/K106S/Y155F/K228N
YNSGKLEEFVQGNLERECMEEKCSFEEAREVFENTERTTEFWKQYVDGDQCESNPCLNGGSCKDDINSYECWCPFGFEGKNCELDVTCNIKNGRCEQFCKNSANNSVVCSCTEGYRLAENQKSCEPAVPFPCGRVSVSQTSKLTRAETVFPDVDFVNSTEAETILDNITQSTQSFNDFTRVVGGEDAKPGQFPWQVVLNGKVDAFCGGSIVNEKWIVTAAHCVETGVNITVVAGEHNIEETEHTEQKRNVIRIIPHHNYNAAINKYNHDIALLELDEPLVLNSYVTPICIADKEYTNIFLKFGSGYVSGWGRVFHKGRSALVLQYLRVPLVDRATCLRSTKFTIYNNMFCAGFHEGGRDSCQGDSGGPHVTEVEGTSFLTGIISWGEECAMKGKYGIYTKVSRYVNWIKEKTKLT

SEQ ID NO: 248 - protein, 415 aa, Artificial Sequence
  Factor IX Y155F/K228N/K247N/N249S
YNSGKLEEFVQGNLERECMEEKCSFEEAREVFENTERTTEFWKQYVDGDQCESNPCLNGGSCKDDINSYECWCPFGFEGKNCELDVTCNIKNGRCEQFCKNSADNKVVCSCTEGYRLAENQKSCEPAVPFPCGRVSVSQTSKLTRAETVFPDVDFVNSTEAETILDNITQSTQSFNDFTRVVGGEDAKPGQFPWQVVLNGKVDAFCGGSIVNEKWIVTAAHCVETGVNITVVAGEHNIEETEHTEQNRSVIRIIPHHNYNAAINKYNHDIALLELDEPLVLNSYVTPICIADKEYTNIFLKFGSGYVSGWGRVFHKGRSALVLQYLRVPLVDRATCLRSTKFTIYNNMFCAGFHEGGRDSCQGDSGGPHVTEVEGTSFLTGIISWGEECAMKGKYGIYTKVSRYVNWIKEKTKLT

SEQ ID NO: 249 - protein, 415 aa, Artificial Sequence
  Factor IX R318Y/R338E/R403E/E410S
YNSGKLEEFVQGNLERECMEEKCSFEEAREVFENTERTTEFWKQYVDGDQCESNPCLNGGSCKDDINSYECWCPFGFEGKNCELDVTCNIKNGRCEQFCKNSADNKVVCSCTEGYRLAENQKSCEPAVPFPCGRVSVSQTSKLTRAETVFPDVDYVNSTEAETILDNITQSTQSFNDFTRVVGGEDAKPGQFPWQVVLNGKVDAFCGGSIVNEKWIVTAAHCVETGVKITVVAGEHNIEETEHTEQKRNVIRIIPHHNYNAAINKYNHDIALLELDEPLVLNSYVTPICIADKEYTNIFLKFGSGYVSGWGRVFHKGYSALVLQYLRVPLVDRATCLESTKFTIYNNMFCAGFHEGGRDSCQGDSGGPHVTEVEGTSFLTGIISWGEECAMKGKYGIYTKVSEYVNWIKSKTKLT

SEQ ID NO: 250 - protein, 415 aa, Artificial Sequence
  Factor IX R318Y/R338E/R403E/E410N/T412V
YNSGKLEEFVQGNLERECMEEKCSFEEAREVFENTERTTEFWKQYVDGDQCESNPCLNGGSCKDDINSYECWCPFGFEGKNCELDVTCNIKNGRCEQFCKNSADNKVVCSCTEGYRLAENQKSCEPAVPFPCGRVSVSQTSKLTRAETVFPDVDYVNSTEAETILDNITQSTQSFNDFTRVVGGEDAKPGQFPWQVVLNGKVDAFCGGSIVNEKWIVTAAHCVETGVKITVVAGEHNIEETEHTEQKRNVIRIIPHHNYNAAINKYNHDIALLELDEPLVLNSYVTPICIADKEYTNIFLKFGSGYVSGWGRVFHKGYSALVLQYLRVPLVDRATCLESTKFTIYNNMFCAGFHEGGRDSCQGDSGGPHVTEVEGTSFLTGIISWGEECAMKGKYGIYTKVSEYVNWIKNKVKLT

SEQ ID NO: 251 - protein, 415 aa, Artificial Sequence
  Factor IX R318Y/R338E/R403E/E410N/T412A
YNSGKLEEFVQGNLERECMEEKCSFEEAREVFENTERTTEFWKQYVDGDQCESNPCLNGGSCKDDINSYECWCPFGFEGKNCELDVTCNIKNGRCEQFCKNSADNKVVCSCTEGYRLAENQKSCEPAVPFPCGRVSVSQTSKLTRAETVFPDVDYVNSTEAETILDNITQSTQSFNDFTRVVGGEDAKPGQFPWQVVLNGKVDAFCGGSIVNEKWIVTAAHCVETGVKITVVAGEHNIEETEHTEQKRNVIRIIPHHNYNAAINKYNHDIALLELDEPLVLNSYVTPICIADKEYTNIFLKFGSGYVSGWGRVFHKGYSALVLQYLRVPLVDRATCLESTKFTIYNNMFCAGFHEGGRDSCQGDSGGPHVTEVEGTSFLTGIISWGEECAMKGKYGIYTKVSEYVNWIKNKAKLT

SEQ ID NO: 252 - protein, 415 aa, Artificial Sequence
  Factor IX R318Y/R338E/R403E/T412A
YNSGKLEEFVQGNLERECMEEKCSFEEAREVFENTERTTEFWKQYVDGDQCESNPCLNGGSCKDDINSYECWCPFGFEGKNCELDVTCNIKNGRCEQFCKNSADNKVVCSCTEGYRLAENQKSCEPAVPFPCGRVSVSQTSKLTRAETVFPDVDYVNSTEAETILDNITQSTQSFNDFTRVVGGEDAKPGQFPWQVVLNGKVDAFCGGSIVNEKWIVTAAHCVETGVKITVVAGEHNIEETEHTEQKRNVIRIIPHHNYNAAINKYNHDIALLELDEPLVLNSYVTPICIADKEYTNIFLKFGSGYVSGWGRVFHKGYSALVLQYLRVPLVDRATCLESTKFTIYNNMFCAGFHEGGRDSCQGDSGGPHVTEVEGTSFLTGIISWGEECAMKGKYGIYTKVSEYVNWIKEKAKLT

SEQ ID NO: 253 - protein, 415 aa, Artificial Sequence
  Factor IX R318Y/R338E/E410S
YNSGKLEEFVQGNLERECMEEKCSFEEAREVFENTERTTEFWKQYVDGDQCESNPCLNGGSCKDDINSYECWCPFGFEGKNCELDVTCNIKNGRCEQFCKNSADNKVVCSCTEGYRLAENQKSCEPAVPFPCGRVSVSQTSKLTRAETVFPDVDYVNSTEAETILDNITQSTQSFNDFTRVVGGEDAKPGQFPWQVVLNGKVDAFCGGSIVNEKWIVTAAHCVETGVKITVVAGEHNIEETEHTEQKRNVIRIIPHHNYNAAINKYNHDIALLELDEPLVLNSYVTPICIADKEYTNIFLKFGSGYVSGWGRVFHKGYSALVLQYLRVPLVDRATCLESTKFTIYNNMFCAGFHEGGRDSCQGDSGGPHVTEVEGTSFLTGIISWGEECAMKGKYGIYTKVSRYVNWIKSKTKLT

SEQ ID NO: 254 - protein, 415 aa, Artificial Sequence
  Factor IX R318Y/R338E/T412A
YNSGKLEEFVQGNLERECMEEKCSFEEAREVFENTERTTEFWKQYVDGDQCESNPCLNGGSCKDDINSYECWCPFGFEGKNCELDVTCNIKNGRCEQFCKNSADNKVVCSCTEGYRLAENQKSCEPAVPFPCGRVSVSQTSKLTRAETVFPDVDYVNSTEAETILDNITQSTQSFNDFTRVVGGEDAKPGQFPWQVVLNGKVDAFCGGSIVNEKWIVTAAHCVETGVKITVVAGEHNIEETEHTEQKRNVIRIIPHHNYNAAINKYNHDIALLELDEPLVLNSYVTPICIADKEYTNIFLKFGSGYVSGWGRVFHKGYSALVLQYLRVPLVDRATCLESTKFTIYNNMFCAGFHEGGRDSCQGDSGGPHVTEVEGTSFLTGIISWGEECAMKGKYGIYTKVSRYVNWIKEKAKLT

SEQ ID NO: 255 - protein, 415 aa, Artificial Sequence
  Factor IX R318Y/R338E/E410N/T412V
YNSGKLEEFVQGNLERECMEEKCSFEEAREVFENTERTTEFWKQYVDGDQCESNPCLNGGSCKDDINSYECWCPFGFEGKNCELDVTCNIKNGRCEQFCKNSADNKVVCSCTEGYRLAENQKSCEPAVPFPCGRVSVSQTSKLTRAETVFPDVDYVNSTEAETILDNITQSTQSFNDFTRVVGGEDAKPGQFPWQVVLNGKVDAFCGGSIVNEKWIVTAAHCVETGVKITVVAGEHNIEETEHTEQKRNVIRIIPHHNYNAAINKYNHDIALLELDEPLVLNSYVTPICIADKEYTNIFLKFGSGYVSGWGRVFHKGYSALVLQYLRVPLVDRATCLESTKFTIYNNMFCAGFHEGGRDSCQGDSGGPHVTEVEGTSFLTGIISWGEECAMKGKYGIYTKVSRYVNWIKNKVKLT

SEQ ID NO: 256 - protein, 415 aa, Artificial Sequence
  Factor IX D85N/K228N/R318Y/R338E/R403E/E410N
YNSGKLEEFVQGNLERECMEEKCSFEEAREVFENTERTTEFWKQYVDGDQCESNPCLNGGSCKDDINSYECWCPFGFEGKNCELNVTCNIKNGRCEQFCKNSADNKVVCSCTEGYRLAENQKSCEPAVPFPCGRVSVSQTSKLTRAETVFPDVDYVNSTEAETILDNITQSTQSFNDFTRVVGGEDAKPGQFPWQVVLNGKVDAFCGGSIVNEKWIVTAAHCVETGVNITVVAGEHNIEETEHTEQKRNVIRIIPHHNYNAAINKYNHDIALLELDEPLVLNSYVTPICIADKEYTNIFLKFGSGYVSGWGRVFHKGYSALVLQYLRVPLVDRATCLESTKFTIYNNMFCAGFHEGGRDSCQGDSGGPHVTEVEGTSFLTGIISWGEECAMKGKYGIYTKVSEYVNWIKNKTKLT

SEQ ID NO: 257 - protein, 415 aa, Artificial Sequence
  Factor IX N260S/R318Y/R338E/R403E/E410N
YNSGKLEEFVQGNLERECMEEKCSFEEAREVFENTERTTEFWKQYVDGDQCESNPCLNGGSCKDDINSYECWCPFGFEGKNCELDVTCNIKNGRCEQFCKNSADNKVVCSCTEGYRLAENQKSCEPAVPFPCGRVSVSQTSKLTRAETVFPDVDYVNSTEAETILDNITQSTQSFNDFTRVVGGEDAKPGQFPWQVVLNGKVDAFCGGSIVNEKWIVTAAHCVETGVKITVVAGEHNIEETEHTEQKRNVIRIIPHHNYSAAINKYNHDIALLELDEPLVLNSYVTPICIADKEYTNIFLKFGSGYVSGWGRVFHKGYSALVLQYLRVPLVDRATCLESTKFTIYNNMFCAGFHEGGRDSCQGDSGGPHVTEVEGTSFLTGIISWGEECAMKGKYGIYTKVSEYVNWIKNKTKLT

SEQ ID NO: 258 - protein, 415 aa, Artificial Sequence
  Factor IX R318Y/R338E/N346D/R403E/E410N
YNSGKLEEFVQGNLERECMEEKCSFEEAREVFENTERTTEFWKQYVDGDQCESNPCLNGGSCKDDINSYECWCPFGFEGKNCELDVTCNIKNGRCEQFCKNSADNKVVCSCTEGYRLAENQKSCEPAVPFPCGRVSVSQTSKLTRAETVFPDVDYVNSTEAETILDNITQSTQSFNDFTRVVGGEDAKPGQFPWQVVLNGKVDAFCGGSIVNEKWIVTAAHCVETGVKITVVAGEHNIEETEHTEQKRNVIRIIPHHNYNAAINKYNHDIALLELDEPLVLNSYVTPICIADKEYTNIFLKFGSGYVSGWGRVFHKGYSALVLQYLRVPLVDRATCLESTKFTIYDNMFCAGFHEGGRDSCQGDSGGPHVTEVEGTSFLTGIISWGEECAMKGKYGIYTKVSEYVNWIKNKTKLT

SEQ ID NO: 259 - protein, 415 aa, Artificial Sequence
  Factor IX Y155F/N346D
YNSGKLEEFVQGNLERECMEEKCSFEEAREVFENTERTTEFWKQYVDGDQCESNPCLNGGSCKDDINSYECWCPFGFEGKNCELDVTCNIKNGRCEQFCKNSADNKVVCSCTEGYRLAENQKSCEPAVPFPCGRVSVSQTSKLTRAETVFPDVDFVNSTEAETILDNITQSTQSFNDFTRVVGGEDAKPGQFPWQVVLNGKVDAFCGGSIVNEKWIVTAAHCVETGVKITVVAGEHNIEETEHTEQKRNVIRIIPHHNYNAAINKYNHDIALLELDEPLVLNSYVTPICIADKEYTNIFLKFGSGYVSGWGRVFHKGRSALVLQYLRVPLVDRATCLRSTKFTIYDNMFCAGFHEGGRDSCQGDSGGPHVTEVEGTSFLTGIISWGEECAMKGKYGIYTKVSRYVNWIKEKTKLT

SEQ ID NO: 260 - protein, 415 aa, Artificial Sequence
  Factor IX Y155F/R318Y/R338E/N346D/R403E/E410N
YNSGKLEEFVQGNLERECMEEKCSFEEAREVFENTERTTEFWKQYVDGDQCESNPCLNGGSCKDDINSYECWCPFGFEGKNCELDVTCNIKNGRCEQFCKNSADNKVVCSCTEGYRLAENQKSCEPAVPFPCGRVSVSQTSKLTRAETVFPDVDFVNSTEAETILDNITQSTQSFNDFTRVVGGEDAKPGQFPWQVVLNGKVDAFCGGSIVNEKWIVTAAHCVETGVKITVVAGEHNIEETEHTEQKRNVIRIIPHHNYNAAINKYNHDIALLELDEPLVLNSYVTPICIADKEYTNIFLKFGSGYVSGWGRVFHKGYSALVLQYLRVPLVDRATCLESTKFTIYDNMFCAGFHEGGRDSCQGDSGGPHVTEVEGTSFLTGIISWGEECAMKGKYGIYTKVSEYVNWIKNKTKLT

SEQ ID NO: 261 - protein, 415 aa, Artificial Sequence
  Factor IX Y155F/N260S/N346D
YNSGKLEEFVQGNLERECMEEKCSFEEAREVFENTERTTEFWKQYVDGDQCESNPCLNGGSCKDDINSYECWCPFGFEGKNCELDVTCNIKNGRCEQFCKNSADNKVVCSCTEGYRLAENQKSCEPAVPFPCGRVSVSQTSKLTRAETVFPDVDFVNSTEAETILDNITQSTQSFNDFTRVVGGEDAKPGQFPWQVVLNGKVDAFCGGSIVNEKWIVTAAHCVETGVKITVVAGEHNIEETEHTEQKRNVIRIIPHHNYSAAINKYNHDIALLELDEPLVLNSYVTPICIADKEYTNIFLKFGSGYVSGWGRVFHKGRSALVLQYLRVPLVDRATCLRSTKFTIYDNMFCAGFHEGGRDSCQGDSGGPHVTEVEGTSFLTGIISWGEECAMKGKYGIYTKVSRYVNWIKEKTKLT

SEQ ID NO: 262 - protein, 415 aa, Artificial Sequence
  Factor IX K247N/N249S/N260S
YNSGKLEEFVQGNLERECMEEKCSFEEAREVFENTERTTEFWKQYVDGDQCESNPCLNGGSCKDDINSYECWCPFGFEGKNCELDVTCNIKNGRCEQFCKNSADNKVVCSCTEGYRLAENQKSCEPAVPFPCGRVSVSQTSKLTRAETVFPDVDYVNSTEAETILDNITQSTQSFNDFTRVVGGEDAKPGQFPWQVVLNGKVDAFCGGSIVNEKWIVTAAHCVETGVKITVVAGEHNIEETEHTEQNRSVIRIIPHHNYSAAINKYNHDIALLELDEPLVLNSYVTPICIADKEYTNIFLKFGSGYVSGWGRVFHKGRSALVLQYLRVPLVDRATCLRSTKFTIYNNMFCAGFHEGGRDSCQGDSGGPHVTEVEGTSFLTGIISWGEECAMKGKYGIYTKVSRYVNWIKEKTKLT

SEQ ID NO: 263 - protein, 415 aa, Artificial Sequence
  Factor IX Y155F/N260S
YNSGKLEEFVQGNLERECMEEKCSFEEAREVFENTERTTEFWKQYVDGDQCESNPCLNGGSCKDDINSYECWCPFGFEGKNCELDVTCNIKNGRCEQFCKNSADNKVVCSCTEGYRLAENQKSCEPAVPFPCGRVSVSQTSKLTRAETVFPDVDFVNSTEAETILDNITQSTQSFNDFTRVVGGEDAKPGQFPWQVVLNGKVDAFCGGSIVNEKWIVTAAHCVETGVKITVVAGEHNIEETEHTEQKRNVIRIIPHHNYSAAINKYNHDIALLELDEPLVLNSYVTPICIADKEYTNIFLKFGSGYVSGWGRVFHKGRSALVLQYLRVPLVDRATCLRSTKFTIYNNMFCAGFHEGGRDSCQGDSGGPHVTEVEGTSFLTGIISWGEECAMKGKYGIYTKVSRYVNWIKEKTKLT

SEQ ID NO: 264 - protein, 415 aa, Artificial Sequence
  Factor IX K247N/N249S/N260S/R318Y/R338E/R403E/E410N
YNSGKLEEFVQGNLERECMEEKCSFEEAREVFENTERTTEFWKQYVDGDQCESNPCLNGGSCKDDINSYECWCPFGFEGKNCELDVTCNIKNGRCEQFCKNSADNKVVCSCTEGYRLAENQKSCEPAVPFPCGRVSVSQTSKLTRAETVFPDVDYVNSTEAETILDNITQSTQSFNDFTRVVGGEDAKPGQFPWQVVLNGKVDAFCGGSIVNEKWIVTAAHCVETGVKITVVAGEHNIEETEHTEQNRSVIRIIPHHNYSAAINKYNHDIALLELDEPLVLNSYVTPICIADKEYTNIFLKFGSGYVSGWGRVFHKGYSALVLQYLRVPLVDRATCLESTKFTIYNNMFCAGFHEGGRDSCQGDSGGPHVTEVEGTSFLTGIISWGEECAMKGKYGIYTKVSEYVNWIKNKTKLT

SEQ ID NO: 265 - protein, 415 aa, Artificial Sequence
  Factor IX D104N/K106S/N260S/R318Y/R338E/R403E/E410N
YNSGKLEEFVQGNLERECMEEKCSFEEAREVFENTERTTEFWKQYVDGDQCESNPCLNGGSCKDDINSYECWCPFGFEGKNCELDVTCNIKNGRCEQFCKNSANNSVVCSCTEGYRLAENQKSCEPAVPFPCGRVSVSQTSKLTRAETVFPDVDYVNSTEAETILDNITQSTQSFNDFTRVVGGEDAKPGQFPWQVVLNGKVDAFCGGSIVNEKWIVTAAHCVETGVKITVVAGEHNIEETEHTEQKRNVIRIIPHHNYSAAINKYNHDIALLELDEPLVLNSYVTPICIADKEYTNIFLKFGSGYVSGWGRVFHKGYSALVLQYLRVPLVDRATCLESTKFTIYNNMFCAGFHEGGRDSCQGDSGGPHVTEVEGTSFLTGIISWGEECAMKGKYGIYTKVSEYVNWIKNKTKLT

SEQ ID NO: 266 - protein, 415 aa, Artificial Sequence
  Factor IX Y155F/N260S/R318Y/R338E/R403E/E410N
YNSGKLEEFVQGNLERECMEEKCSFEEAREVFENTERTTEFWKQYVDGDQCESNPCLNGGSCKDDINSYECWCPFGFEGKNCELDVTCNIKNGRCEQFCKNSADNKVVCSCTEGYRLAENQKSCEPAVPFPCGRVSVSQTSKLTRAETVFPDVDFVNSTEAETILDNITQSTQSFNDFTRVVGGEDAKPGQFPWQVVLNGKVDAFCGGSIVNEKWIVTAAHCVETGVKITVVAGEHNIEETEHTEQKRNVIRIIPHHNYSAAINKYNHDIALLELDEPLVLNSYVTPICIADKEYTNIFLKFGSGYVSGWGRVFHKGYSALVLQYLRVPLVDRATCLESTKFTIYNNMFCAGFHEGGRDSCQGDSGGPHVTEVEGTSFLTGIISWGEECAMKGKYGIYTKVSEYVNWIKNKTKLT

SEQ ID NO: 267 - protein, 415 aa, Artificial Sequence
  Factor IX R318Y/R338E/T343R/R403E/E410N
YNSGKLEEFVQGNLERECMEEKCSFEEAREVFENTERTTEFWKQYVDGDQCESNPCLNGGSCKDDINSYECWCPFGFEGKNCELDVTCNIKNGRCEQFCKNSADNKVVCSCTEGYRLAENQKSCEPAVPFPCGRVSVSQTSKLTRAETVFPDVDYVNSTEAETILDNITQSTQSFNDFTRVVGGEDAKPGQFPWQVVLNGKVDAFCGGSIVNEKWIVTAAHCVETGVKITVVAGEHNIEETEHTEQKRNVIRIIPHHNYNAAINKYNHDIALLELDEPLVLNSYVTPICIADKEYTNIFLKFGSGYVSGWGRVFHKGYSALVLQYLRVPLVDRATCLESTKFRIYNNMFCAGFHEGGRDSCQGDSGGPHVTEVEGTSFLTGIISWGEECAMKGKYGIYTKVSEYVNWIKNKTKLT

SEQ ID NO: 268 - protein, 415 aa, Artificial Sequence
  Factor IX R338E/T343R
YNSGKLEEFVQGNLERECMEEKCSFEEAREVFENTERTTEFWKQYVDGDQCESNPCLNGGSCKDDINSYECWCPFGFEGKNCELDVTCNIKNGRCEQFCKNSADNKVVCSCTEGYRLAENQKSCEPAVPFPCGRVSVSQTSKLTRAETVFPDVDYVNSTEAETILDNITQSTQSFNDFTRVVGGEDAKPGQFPWQVVLNGKVDAFCGGSIVNEKWIVTAAHCVETGVKITVVAGEHNIEETEHTEQKRNVIRIIPHHNYNAAINKYNHDIALLELDEPLVLNSYVTPICIADKEYTNIFLKFGSGYVSGWGRVFHKGRSALVLQYLRVPLVDRATCLESTKFRIYNNMFCAGFHEGGRDSCQGDSGGPHVTEVEGTSFLTGIISWGEECAMKGKYGIYTKVSRYVNWIKEKTKLT

SEQ ID NO: 269 - protein, 415 aa, Artificial Sequence
  Factor IX D104N/K106S/Y155F/N260S
YNSGKLEEFVQGNLERECMEEKCSFEEAREVFENTERTTEFWKQYVDGDQCESNPCLNGGSCKDDINSYECWCPFGFEGKNCELDVTCNIKNGRCEQFCKNSANNSVVCSCTEGYRLAENQKSCEPAVPFPCGRVSVSQTSKLTRAETVFPDVDFVNSTEAETILDNITQSTQSFNDFTRVVGGEDAKPGQFPWQVVLNGKVDAFCGGSIVNEKWIVTAAHCVETGVKITVVAGEHNIEETEHTEQKRNVIRIIPHHNYSAAINKYNHDIALLELDEPLVLNSYVTPICIADKEYTNIFLKFGSGYVSGWGRVFHKGRSALVLQYLRVPLVDRATCLRSTKFTIYNNMFCAGFHEGGRDSCQGDSGGPHVTEVEGTSFLTGIISWGEECAMKGKYGIYTKVSRYVNWIKEKTKLT

SEQ ID NO: 270 - protein, 415 aa, Artificial Sequence
  Factor IX Y155F/K247N/N249S/N260S
YNSGKLEEFVQGNLERECMEEKCSFEEAREVFENTERTTEFWKQYVDGDQCESNPCLNGGSCKDDINSYECWCPFGFEGKNCELDVTCNIKNGRCEQFCKNSADNKVVCSCTEGYRLAENQKSCEPAVPFPCGRVSVSQTSKLTRAETVFPDVDFVNSTEAETILDNITQSTQSFNDFTRVVGGEDAKPGQFPWQVVLNGKVDAFCGGSIVNEKWIVTAAHCVETGVKITVVAGEHNIEETEHTEQNRSVIRIIPHHNYSAAINKYNHDIALLELDEPLVLNSYVTPICIADKEYTNIFLKFGSGYVSGWGRVFHKGRSALVLQYLRVPLVDRATCLRSTKFTIYNNMFCAGFHEGGRDSCQGDSGGPHVTEVEGTSFLTGIISWGEECAMKGKYGIYTKVSRYVNWIKEKTKLT

SEQ ID NO: 271 - protein, 415 aa, Artificial Sequence
  Factor IX D104N/K106S/K247N/N249S/N260S
YNSGKLEEFVQGNLERECMEEKCSFEEAREVFENTERTTEFWKQYVDGDQCESNPCLNGGSCKDDINSYECWCPFGFEGKNCELDVTCNIKNGRCEQFCKNSANNSVVCSCTEGYRLAENQKSCEPAVPFPCGRVSVSQTSKLTRAETVFPDVDYVNSTEAETILDNITQSTQSFNDFTRVVGGEDAKPGQFPWQVVLNGKVDAFCGGSIVNEKWIVTAAHCVETGVKITVVAGEHNIEETEHTEQNRSVIRIIPHHNYSAAINKYNHDIALLELDEPLVLNSYVTPICIADKEYTNIFLKFGSGYVSGWGRVFHKGRSALVLQYLRVPLVDRATCLRSTKFTIYNNMFCAGFHEGGRDSCQGDSGGPHVTEVEGTSFLTGIISWGEECAMKGKYGIYTKVSRYVNWIKEKTKLT

SEQ ID NO: 272 - protein, 415 aa, Artificial Sequence
  Factor IX D104N/K106S/Y155F/K247N/N249S/N260S
YNSGKLEEFVQGNLERECMEEKCSFEEAREVFENTERTTEFWKQYVDGDQCESNPCLNGGSCKDDINSYECWCPFGFEGKNCELDVTCNIKNGRCEQFCKNSANNSVVCSCTEGYRLAENQKSCEPAVPFPCGRVSVSQTSKLTRAETVFPDVDFVNSTEAETILDNITQSTQSFNDFTRVVGGEDAKPGQFPWQVVLNGKVDAFCGGSIVNEKWIVTAAHCVETGVKITVVAGEHNIEETEHTEQNRSVIRIIPHHNYSAAINKYNHDIALLELDEPLVLNSYVTPICIADKEYTNIFLKFGSGYVSGWGRVFHKGRSALVLQYLRVPLVDRATCLRSTKFTIYNNMFCAGFHEGGRDSCQGDSGGPHVTEVEGTSFLTGIISWGEECAMKGKYGIYTKVSRYVNWIKEKTKLT

SEQ ID NO: 273 - DNA, 34 bp, Artificial Sequence
  F9-D[64]N-For
ggcggcagttgcaagaacgacattaattcctatg

SEQ ID NO: 274 - DNA, 34 bp, Artificial Sequence
  F9-D[64]A-For
ggcggcagttgcaaggctgacattaattcctatg

SEQ ID NO: 275 - DNA, 39 bp, Artificial Sequence
  F9-N[157]Q-For
cctgatgtggactatgtacagtctactgaagctgaaacc

SEQ ID NO: 276 - DNA, 39 bp, Artificial Sequence
  F9-N[157]D-For
cctgatgtggactatgtagactctactgaagctgaaacc

SEQ ID NO: 277 - DNA, 33 bp, Artificial Sequence
  F9-N[167]Q-For
gaaaccattttggatcagatcactcaaagcacc

SEQ ID NO: 278 - DNA, 33 bp, Artificial Sequence
  F9-N[167]D-For
gaaaccattttggatgacatcactcaaagcacc

SEQ ID NO: 279 - DNA, 42 bp, Artificial Sequence
  F9-S[61]A-For
ccatgtttaaatggcggcgcttgcaaggatgacattaattcc

SEQ ID NO: 280 - DNA, 39 bp, Artificial Sequence
  F9-S[53]A-For
gatggagatcagtgtgaggctaatccatgtttaaatggc

SEQ ID NO: 281 - DNA, 39 bp, Artificial Sequence
  F9-T[159]A-For
gtggactatgtaaattctgctgaagctgaaaccattttg

SEQ ID NO: 282 - DNA, 43 bp, Artificial Sequence
  F9-T[169]A-For
cattttggataacatcgctcaaagcacccaatcatttaatgac

SEQ ID NO: 283 - DNA, 36 bp, Artificial Sequence
  F9-T[172]A-For
gataacatcactcaaagcgctcaatcatttaatgac

SEQ ID NO: 284 - DNA, 40 bp, Artificial Sequence
  F9-T[179]A-For
caatcatttaatgacttcgctcgggttgttggtggagaag

SEQ ID NO: 285 - DNA, 40 bp, Artificial Sequence
  F9-Y[155]F-For
gtttttcctgatgtggacttcgtaaattctactgaagctg

SEQ ID NO: 286 - DNA, 40 bp, Artificial Sequence
  F9-Y[155]H-For
gtttttcctgatgtggaccacgtaaattctactgaagctg

SEQ ID NO: 287 - DNA, 40 bp, Artificial Sequence
  F9-Y[155]Q-For
gtttttcctgatgtggaccaggtaaattctactgaagctg

SEQ ID NO: 288 - DNA, 33 bp, Artificial Sequence
  F9-S[158]A-For
gtggactatgtaaatgctactgaagctgaaacc

SEQ ID NO: 289 - DNA, 33 bp, Artificial Sequence
  F9-S[158]D-For
gtggactatgtaaatgacactgaagctgaaacc

SEQ ID NO: 290 - DNA, 33 bp, Artificial Sequence
  F9-S[158]E-For
gtggactatgtaaatgagactgaagctgaaacc

SEQ ID NO: 291 - DNA, 36 bp, Artificial Sequence
  F9-R165S-For
gttccacttgttgacagcgccacatgtcttcgatct

SEQ ID NO: 292 - DNA, 33 bp, Artificial Sequence
  F9-R170L-For
cgagccacatgtcttctgtctacaaagttcacc

SEQ ID NO: 293 - DNA, 34 bp, Artificial Sequence
  F9-K148N-For
ggaagagtcttccacaacgggagatcagctttag

SEQ ID NO: 294 - DNA, 34 bp, Artificial Sequence
  F9-K148A-For
ggaagagtcttccacgctgggagatcagctttag

SEQ ID NO: 295 - DNA, 34 bp, Artificial Sequence
  F9-K148E-For
ggaagagtcttccacgaggggagatcagctttag

SEQ ID NO: 296 - DNA, 34 bp, Artificial Sequence
  F9-K148S-For
ggaagagtcttccacagcgggagatcagctttag

SEQ ID NO: 297 - DNA, 34 bp, Artificial Sequence
  F9-K148M-For
ggaagagtcttccacatggggagatcagctttag

SEQ ID NO: 298 - DNA, 34 bp, Artificial Sequence
  F9-E74S-For
ggtgaacataatattagcgagacagaacatacag

SEQ ID NO: 299 - DNA, 34 bp, Artificial Sequence
  F9-E74A-For
ggtgaacataatattgctgagacagaacatacag

SEQ ID NO: 300 - DNA, 34 bp, Artificial Sequence
  F9-E74R-For
ggtgaacataatattagggagacagaacatacag

SEQ ID NO: 301 - DNA, 34 bp, Artificial Sequence
  F9-E74K-For
ggtgaacataatattaaggagacagaacatacag

SEQ ID NO: 302 - DNA, 32 bp, Artificial Sequence
  F9-H92F-For-Corr
cgaattattcctcacttcaactacaatgcagc

SEQ ID NO: 303 - DNA, 32 bp, Artificial Sequence
  F9-H92Y-For-Corr
cgaattattcctcactacaactacaatgcagc

SEQ ID NO: 304 - DNA, 32 bp, Artificial Sequence
  F9-H92E-For-Corr
cgaattattcctcacgaaaactacaatgcagc

SEQ ID NO: 305 - DNA, 32 bp, Artificial Sequence
  F9-H92S-For-Corr
cgaattattcctcacagcaactacaatgcagc

SEQ ID NO: 306 - DNA, 34 bp, Artificial Sequence
  F9-T242A-For
ctggattaaggaaaaagctaagctcacttaagtg

SEQ ID NO: 307 - DNA, 34 bp, Artificial Sequence
  F9-T242V-For
ctggattaaggaaaaagtgaagctcacttaagtg

SEQ ID NO: 308 - DNA, 39 bp, Artificial Sequence
  F9-E240N/T242A-For
gtcaactggattaagaacaaagctaagctcacttaagtg

SEQ ID NO: 309 - DNA, 39 bp, Artificial Sequence
  F9-E240N/T242V-For
gtcaactggattaagaacaaagtgaagctcacttaagtg

SEQ ID NO: 310 - DNA, 37 bp, Artificial Sequence
  F9-E240Q-For
gtcaactggattaagcagaaaacaaagctcacttaag

SEQ ID NO: 311 - DNA, 37 bp, Artificial Sequence
  F9-E240S-For
gtcaactggattaagagcaaaacaaagctcacttaag

SEQ ID NO: 312 - DNA, 37 bp, Artificial Sequence
  F9-E240A-For
gtcaactggattaaggctaaaacaaagctcacttaag

SEQ ID NO: 313 - DNA, 37 bp, Artificial Sequence
  F9-E240D-For
gtcaactggattaaggacaaaacaaagctcacttaag

SEQ ID NO: 314 - DNA, 38 bp, Artificial Sequence
  F9-N178D-For
caaagttcaccatctatgacaacatgttctgtgctggc

SEQ ID NO: 315 - DNA, 38 bp, Artificial Sequence
  F9-N178Y-For
caaagttcaccatctattacaacatgttctgtgctggc

SEQ ID NO: 316 - DNA, 37 bp, Artificial Sequence
  F9-Y177A-For
ctacaaagttcaccatcgctaacaacatgttctgtgc

SEQ ID NO: 317 - DNA, 37 bp, Artificial Sequence
  F9-Y177T-For
ctacaaagttcaccatcaccaacaacatgttctgtgc

SEQ ID NO: 318 - DNA, 39 bp, Artificial Sequence
  F9-T175R-For
cttcgatctacaaagttcaggatctataacaacatgttc

SEQ ID NO: 319 - DNA, 39 bp, Artificial Sequence
  F9-T175E-For
cttcgatctacaaagttcgaaatctataacaacatgttc

SEQ ID NO: 320 - DNA, 39 bp, Artificial Sequence
  F9-T175Q-For
cttcgatctacaaagttccagatctataacaacatgttc

SEQ ID NO: 321 - DNA, 38 bp, Artificial Sequence
  F9-F174I/Y177T-For
gtcttcgatctacaaagatcaccatctataacaacatg

SEQ ID NO: 322 - DNA, 40 bp, Artificial Sequence
  F9-T175R/Y177T-For
cgatctacaaagttcaggatcaccaacaacatgttctgtg

SEQ ID NO: 323 - DNA, 57 bp, Artificial Sequence
  F9-Y94F/K98T-For
gaattattcctcaccacaacttcaatgcagctattaatacctacaaccatgacattg

SEQ ID NO: 324 - DNA, 40 bp, Artificial Sequence
  F9-F145N/K148S-For
ggctggggaagagtcaaccacagcgggagatcagctttag

SEQ ID NO: 325 - protein, 461 aa, Homo sapiens [sequence omitted]

SEQ ID NO: 326 - protein, 415 aa, Homo sapiens
  Factor IX D104N/K106S/Y155F/K247N/ N249S/R318Y/R338E/R403E/E410N
YNSGKLEEFVQGNLERECMEEKCSFEEAREVFENTERTTEFWKQYVDGDQCESNPCLNGGSCKDDINSYECWCPFGFEGKNCELDVTCNIKNGRCEQFCKNSANNSVVCSCTEGYRLAENQKSCEPAVPFPCGRVSVSQTSKLTRAETVFPDVDFVNSTEAETILDNITQSTQSFNDFTRVVGGEDAKPGQFPWQVVLNGKVDAFCGGSIVNEKWIVTAAHCVETGVKITVVAGEHNIEETEHTEQNRSVIRIIPHHNYNAAINKYNHDIALLELDEPLVLNSYVTPICIADKEYTNIFLKFGSGYVSGWGRVFHKGYSALVLQYLRVPLVDRATCLESTKFTIYNNMFCAGFHEGGRDSCQGDSGGPHVTEVEGTSFLTGIISWGEECAMKGKYGIYTKVSEYVNWIKNKTKLT

SEQ ID NO: 327 - protein, 415 aa, Homo sapiens
  Factor IX D104N/K106S/K228N/K247N/ N249S/R318Y/R338E/R403E/E410N
YNSGKLEEFVQGNLERECMEEKCSFEEAREVFENTERTTEFWKQYVDGDQCESNPCLNGGSCKDDINSYECWCPFGFEGKNCELDVTCNIKNGRCEQFCKNSANNSVVCSCTEGYRLAENQKSCEPAVPFPCGRVSVSQTSKLTRAETVFPDVDYVNSTEAETILDNITQSTQSFNDFTRVVGGEDAKPGQFPWQVVLNGKVDAFCGGSIVNEKWIVTAAHCVETGVNITVVAGEHNIEETEHTEQNRSVIRIIPHHNYNAAINKYNHDIALLELDEPLVLNSYVTPICIADKEYTNIFLKFGSGYVSGWGRVFHKGYSALVLQYLRVPLVDRATCLESTKFTIYNNMFCAGFHEGGRDSCQGDSGGPHVTEVEGTSFLTGIISWGEECAMKGKYGIYTKVSEYVNWIKNKTKLT

SEQ ID NO: 328 - protein, 415 aa, Homo sapiens
  Factor IX Y155F/K228N/K247N/N249S/ R318Y/R338E/R403E/E410N
YNSGKLEEFVQGNLERECMEEKCSFEEAREVFENTERTTEFWKQYVDGDQCESNPCLNGGSCKDDINSYECWCPFGFEGKNCELDVTCNIKNGRCEQFCKNSADNKVVCSCTEGYRLAENQKSCEPAVPFPCGRVSVSQTSKLTRAETVFPDVDFVNSTEAETILDNITQSTQSFNDFTRVVGGEDAKPGQFPWQVVLNGKVDAFCGGSIVNEKWIVTAAHCVETGVNITVVAGEHNIEETEHTEQNRSVIRIIPHHNYNAAINKYNHDIALLELDEPLVLNSYVTPICIADKEYTNIFLKFGSGYVSGWGRVFHKGYSALVLQYLRVPLVDRATCLESTKFTIYNNMFCAGFHEGGRDSCQGDSGGPHVTEVEGTSFLTGIISWGEECAMKGKYGIYTKVSEYVNWIKNKTKLT

SEQ ID NO: 329 - protein, 415 aa, Homo sapiens
  Factor IX Y155F/K247N/N249S/N260S/ R318Y/R338E/R403E/E410N
YNSGKLEEFVQGNLERECMEEKCSFEEAREVFENTERTTEFWKQYVDGDQCESNPCLNGGSCKDDINSYECWCPFGFEGKNCELDVTCNIKNGRCEQFCKNSADNKVVCSCTEGYRLAENQKSCEPAVPFPCGRVSVSQTSKLTRAETVFPDVDFVNSTEAETILDNITQSTQSFNDFTRVVGGEDAKPGQFPWQVVLNGKVDAFCGGSIVNEKWIVTAAHCVETGVKITVVAGEHNIEETEHTEQNRSVIRIIPHHNYSAAINKYNHDIALLELDEPLVLNSYVTPICIADKEYTNIFLKFGSGYVSGWGRVFHKGYSALVLQYLRVPLVDRATCLESTKFTIYNNMFCAGFHEGGRDSCQGDSGGPHVTEVEGTSFLTGIISWGEECAMKGKYGIYTKVSEYVNWIKNKTKLT

SEQ ID NO: 330 - protein, 415 aa, Homo sapiens
  Factor IX Y155F/R318Y/R338E/T343R/R403E/E410N
YNSGKLEEFVQGNLERECMEEKCSFEEAREVFENTERTTEFWKQYVDGDQCESNPCLNGGSCKDDINSYECWCPFGFEGKNCELDVTCNIKNGRCEQFCKNSADNKVVCSCTEGYRLAENQKSCEPAVPFPCGRVSVSQTSKLTRAETVFPDVDFVNSTEAETILDNITQSTQSFNDFTRVVGGEDAKPGQFPWQVVLNGKVDAFCGGSIVNEKWIVTAAHCVETGVKITVVAGEHNIEETEHTEQKRNVIRIIPHHNYNAAINKYNHDIALLELDEPLVLNSYVTPICIADKEYTNIFLKFGSGYVSGWGRVFHKGYSALVLQYLRVPLVDRATCLESTKFRIYNNMFCAGFHEGGRDSCQGDSGGPHVTEVEGTSFLTGIISWGEECAMKGKYGIYTKVSEYVNWIKNKTKLT

SEQ ID NO: 331 - protein, 415 aa, Homo sapeins
  Factor IX D104N/K106S/R318Y/R338E/T343R/R403E/E410N
YNSGKLEEFVQGNLERECMEEKCSFEEAREVFENTERTTEFWKQYVDGDQCESNPCLNGGSCKDDINSYECWCPFGFEGKNCELDVTCNIKNGRCEQFCKNSANNSVVCSCTEGYRLAENQKSCEPAVPFPCGRVSVSQTSKLTRAETVFPDVDYVNSTEAETILDNITQSTQSFNDFTRVVGGEDAKPGQFPWQVVLNGKVDAFCGGSIVNEKWIVTAAHCVETGVKITVVAGEHNIEETEHTEQKRNVIRIIPHHNYNAAINKYNHDIALLELDEPLVLNSYVTPICIADKEYTNIFLKFGSGYVSGWGRVFHKGYSALVLQYLRVPLVDRATCLESTKFRIYNNMFCAGFHEGGRDSCQGDSGGPHVTEVEGTSFLTGIISWGEECAMKGKYGIYTKVSEYVNWIKNKTKLT

SEQ ID NO: 332 - protein, 415 aa, Homo sapiens
  Factor IX T343R/N346Y
YNSGKLEEFVQGNLERECMEEKCSFEEAREVFENTERTTEFWKQYVDGDQCESNPCLNGGSCKDDINSYECWCPFGFEGKNCELDVTCNIKNGRCEQFCKNSADNKVVCSCTEGYRLAENQKSCEPAVPFPCGRVSVSQTSKLTRAETVFPDVDYVNSTEAETILDNITQSTQSFNDFTRVVGGEDAKPGQFPWQVVLNGKVDAFCGGSIVNEKWIVTAAHCVETGVKITVVAGEHNIEETEHTEQKRNVIRIIPHHNYNAAINKYNHDIALLELDEPLVLNSYVTPICIADKEYTNIFLKFGSGYVSGWGRVFHKGRSALVLQYLRVPLVDRATCLRSTKFRIYYNMFCAGFHEGGRDSCQGDSGGPHVTEVEGTSFLTGIISWGEECAMKGKYGIYTKVSRYVNWIKEKTKLT

SEQ ID NO: 333 - protein, 415 aa, Homo sapiens
  Factor IX R318Y/R338E/N346Y/R403E/E410N
YNSGKLEEFVQGNLERECMEEKCSFEEAREVFENTERTTEFWKQYVDGDQCESNPCLNGGSCKDDINSYECWCPFGFEGKNCELDVTCNIKNGRCEQFCKNSADNKVVCSCTEGYRLAENQKSCEPAVPFPCGRVSVSQTSKLTRAETVFPDVDYVNSTEAETILDNITQSTQSFNDFTRVVGGEDAKPGQFPWQVVLNGKVDAFCGGSIVNEKWIVTAAHCVETGVKITVVAGEHNIEETEHTEQKRNVIRIIPHHNYNAAINKYNHDIALLELDEPLVLNSYVTPICIADKEYTNIFLKFGSGYVSGWGRVFHKGYSALVLQYLRVPLVDRATCLESTKFTIYYNMFCAGFHEGGRDSCQGDSGGPHVTEVEGTSFLTGIISWGEECAMKGKYGIYTKVSEYVNWIKNKTKLT

SEQ ID NO: 334 - protein, 415 aa, Homo sapiens
  Factor IX R318Y/R338E/T343R/N346Y/R403E/E410N
YNSGKLEEFVQGNLERECMEEKCSFEEAREVFENTERTTEFWKQYVDGDQCESNPCLNGGSCKDDINSYECWCPFGFEGKNCELDVTCNIKNGRCEQFCKNSADNKVVCSCTEGYRLAENQKSCEPAVPFPCGRVSVSQTSKLTRAETVFPDVDYVNSTEAETILDNITQSTQSFNDFTRVVGGEDAKPGQFPWQVVLNGKVDAFCGGSIVNEKWIVTAAHCVETGVKITVVAGEHNIEETEHTEQKRNVIRIIPHHNYNAAINKYNHDIALLELDEPLVLNSYVTPICIADKEYTNIFLKFGSGYVSGWGRVFHKGYSALVLQYLRVPLVDRATCLESTKFRIYYNMFCAGFHEGGRDSCQGDSGGPHVTEVEGTSFLTGIISWGEECAMKGKYGIYTKVSEYVNWIKNKTKLT

SEQ ID NO: 335 - protein, 415 aa, Homo sapiens
  Factor IX T343R/N346D
YNSGKLEEFVQGNLERECMEEKCSFEEAREVFENTERTTEFWKQYVDGDQCESNPCLNGGSCKDDINSYECWCPFGFEGKNCELDVTCNIKNGRCEQFCKNSADNKVVCSCTEGYRLAENQKSCEPAVPFPCGRVSVSQTSKLTRAETVFPDVDYVNSTEAETILDNITQSTQSFNDFTRVVGGEDAKPGQFPWQVVLNGKVDAFCGGSIVNEKWIVTAAHCVETGVKITVVAGEHNIEETEHTEQKRNVIRIIPHHNYNAAINKYNHDIALLELDEPLVLNSYVTPICIADKEYTNIFLKFGSGYVSGWGRVFHKGRSALVLQYLRVPLVDRATCLRSTKFRIYDNMFCAGFHEGGRDSCQGDSGGPHVTEVEGTSFLTGIISWGEECAMKGKYGIYTKVSRYVNWIKEKTKLT

SEQ ID NO: 336 - protein, 415 aa, Homo sapiens
  Factor IX R318Y/R338E/T343R/N346D/R403E/E410N
YNSGKLEEFVQGNLERECMEEKCSFEEAREVFENTERTTEFWKQYVDGDQCESNPCLNGGSCKDDINSYECWCPFGFEGKNCELDVTCNIKNGRCEQFCKNSADNKVVCSCTEGYRLAENQKSCEPAVPFPCGRVSVSQTSKLTRAETVFPDVDYVNSTEAETILDNITQSTQSFNDFTRVVGGEDAKPGQFPWQVVLNGKVDAFCGGSIVNEKWIVTAAHCVETGVKITVVAGEHNIEETEHTEQKRNVIRIIPHHNYNAAINKYNHDIALLELDEPLVLNSYVTPICIADKEYTNIFLKFGSGYVSGWGRVFHKGYSALVLQYLRVPLVDRATCLESTKFRIYDNMFCAGFHEGGRDSCQGDSGGPHVTEVEGTSFLTGIISWGEECAMKGKYGIYTKVSEYVNWIKNKTKLT

SEQ ID NO: 337 - protein, 415 aa, Homo sapiens
  Factor IX R318Y/R338E/Y345A/R403E/E410N
YNSGKLEEFVQGNLERECMEEKCSFEEAREVFENTERTTEFWKQYVDGDQCESNPCLNGGSCKDDINSYECWCPFGFEGKNCELDVTCNIKNGRCEQFCKNSADNKVVCSCTEGYRLAENQKSCEPAVPFPCGRVSVSQTSKLTRAETVFPDVDYVNSTEAETILDNITQSTQSFNDFTRVVGGEDAKPGQFPWQVVLNGKVDAFCGGSIVNEKWIVTAAHCVETGVKITVVAGEHNIEETEHTEQKRNVIRIIPHHNYNAAINKYNHDIALLELDEPLVLNSYVTPICIADKEYTNIFLKFGSGYVSGWGRVFHKGYSALVLQYLRVPLVDRATCLESTKFTIANNMFCAGFHEGGRDSCQGDSGGPHVTEVEGTSFLTGIISWGEECAMKGKYGIYTKVSEYVNWIKNKTKLT

SEQ ID NO: 338 - protein, 415 aa, Homo sapiens
  Factor IX R318Y/R338E/Y345A/N346D/R403E/E410N
YNSGKLEEFVQGNLERECMEEKCSFEEAREVFENTERTTEFWKQYVDGDQCESNPCLNGGSCKDDINSYECWCPFGFEGKNCELDVTCNIKNGRCEQFCKNSADNKVVCSCTEGYRLAENQKSCEPAVPFPCGRVSVSQTSKLTRAETVFPDVDYVNSTEAETILDNITQSTQSFNDFTRVVGGEDAKPGQFPWQVVLNGKVDAFCGGSIVNEKWIVTAAHCVETGVKITVVAGEHNIEETEHTEQKRNVIRIIPHHNYNAAINKYNHDIALLELDEPLVLNSYVTPICIADKEYTNIFLKFGSGYVSGWGRVFHKGYSALVLQYLRVPLVDRATCLESTKFTIADNMFCAGFHEGGRDSCQGDSGGPHVTEVEGTSFLTGIISWGEECAMKGKYGIYTKVSEYVNWIKNKTKLT

SEQ ID NO: 339 - protein, 415 aa, Homo sapiens
  Factor IX Y155F/K247N/N249S/R318Y/R338E/R403E
YNSGKLEEFVQGNLERECMEEKCSFEEAREVFENTERTTEFWKQYVDGDQCESNPCLNGGSCKDDINSYECWCPFGFEGKNCELDVTCNIKNGRCEQFCKNSADNKVVCSCTEGYRLAENQKSCEPAVPFPCGRVSVSQTSKLTRAETVFPDVDFVNSTEAETILDNITQSTQSFNDFTRVVGGEDAKPGQFPWQVVLNGKVDAFCGGSIVNEKWIVTAAHCVETGVKITVVAGEHNIEETEHTEQNRSVIRIIPHHNYNAAINKYNHDIALLELDEPLVLNSYVTPICIADKEYTNIFLKFGSGYVSGWGRVFHKGYSALVLQYLRVPLVDRATCLESTKFTIYNNMFCAGFHEGGRDSCQGDSGGPHVTEVEGTSFLTGIISWGEECAMKGKYGIYTKVSEYVNWIKEKTKLT

SEQ ID NO: 340 - protein, 415 aa, Homo sapiens
  Factor IX K247N/N249S/R318Y/R338E/R403E
YNSGKLEEFVQGNLERECMEEKCSFEEAREVFENTERTTEFWKQYVDGDQCESNPCLNGGSCKDDINSYECWCPFGFEGKNCELDVTCNIKNGRCEQFCKNSADNKVVCSCTEGYRLAENQKSCEPAVPFPCGRVSVSQTSKLTRAETVFPDVDYVNSTEAETILDNITQSTQSFNDFTRVVGGEDAKPGQFPWQVVLNGKVDAFCGGSIVNEKWIVTAAHCVETGVKITVVAGEHNIEETEHTEQNRSVIRIIPHHNYNAAINKYNHDIALLELDEPLVLNSYVTPICIADKEYTNIFLKFGSGYVSGWGRVFHKGYSALVLQYLRVPLVDRATCLESTKFTIYNNMFCAGFHEGGRDSCQGDSGGPHVTEVEGTSFLTGIISWGEECAMKGKYGIYTKVSEYVNWIKEKTKLT

SEQ ID NO: 341 - protein, 415 aa, Homo sapiens
  Factor IX Y155F/K247N/N249S/R318Y/R403E/E410N
YNSGKLEEFVQGNLERECMEEKCSFEEAREVFENTERTTEFWKQYVDGDQCESNPCLNGGSCKDDINSYECWCPFGFEGKNCELDVTCNIKNGRCEQFCKNSADNKVVCSCTEGYRLAENQKSCEPAVPFPCGRVSVSQTSKLTRAETVFPDVDFVNSTEAETILDNITQSTQSFNDFTRVVGGEDAKPGQFPWQVVLNGKVDAFCGGSIVNEKWIVTAAHCVETGVKITVVAGEHNIEETEHTEQNRSVIRIIPHHNYNAAINKYNHDIALLELDEPLVLNSYVTPICIADKEYTNIFLKFGSGYVSGWGRVFHKGYSALVLQYLRVPLVDRATCLRSTKFTIYNNMFCAGFHEGGRDSCQGDSGGPHVTEVEGTSFLTGIISWGEECAMKGKYGIYTKVSEYVNWIKNKTKLT

SEQ ID NO: 342 - protein, 415 aa, Homo sapiens
  Factor IX K247N/N249S/R318Y/R403E/E410N
YNSGKLEEFVQGNLERECMEEKCSFEEAREVFENTERTTEFWKQYVDGDQCESNPCLNGGSCKDDINSYECWCPFGFEGKNCELDVTCNIKNGRCEQFCKNSADNKVVCSCTEGYRLAENQKSCEPAVPFPCGRVSVSQTSKLTRAETVFPDVDYVNSTEAETILDNITQSTQSFNDFTRVVGGEDAKPGQFPWQVVLNGKVDAFCGGSIVNEKWIVTAAHCVETGVKITVVAGEHNIEETEHTEQNRSVIRIIPHHNYNAAINKYNHDIALLELDEPLVLNSYVTPICIADKEYTNIFLKFGSGYVSGWGRVFHKGYSALVLQYLRVPLVDRATCLRSTKFTIYNNMFCAGFHEGGRDSCQGDSGGPHVTEVEGTSFLTGIISWGEECAMKGKYGIYTKVSEYVNWIKNKTKLT

SEQ ID NO: 343 - protein, 415 aa, Homo sapiens
  Factor IX Y155F/K247N/N249S/R338E/R403E/E410N
YNSGKLEEFVQGNLERECMEEKCSFEEAREVFENTERTTEFWKQYVDGDQCESNPCLNGGSCKDDINSYECWCPFGFEGKNCELDVTCNIKNGRCEQFCKNSADNKVVCSCTEGYRLAENQKSCEPAVPFPCGRVSVSQTSKLTRAETVFPDVDFVNSTEAETILDNITQSTQSFNDFTRVVGGEDAKPGQFPWQVVLNGKVDAFCGGSIVNEKWIVTAAHCVETGVKITVVAGEHNIEETEHTEQNRSVIRIIPHHNYNAAINKYNHDIALLELDEPLVLNSYVTPICIADKEYTNIFLKFGSGYVSGWGRVFHKGRSALVLQYLRVPLVDRATCLESTKFTIYNNMFCAGFHEGGRDSCQGDSGGPHVTEVEGTSFLTGIISWGEECAMKGKYGIYTKVSEYVNWIKNKTKLT

SEQ ID NO: 344 - protein, 415 aa, Homo sapiens
  Factor IX K247N/N249S/R338E/R403E/E410N
YNSGKLEEFVQGNLERECMEEKCSFEEAREVFENTERTTEFWKQYVDGDQCESNPCLNGGSCKDDINSYECWCPFGFEGKNCELDVTCNIKNGRCEQFCKNSADNKVVCSCTEGYRLAENQKSCEPAVPFPCGRVSVSQTSKLTRAETVFPDVDYVNSTEAETILDNITQSTQSFNDFTRVVGGEDAKPGQFPWQVVLNGKVDAFCGGSIVNEKWIVTAAHCVETGVKITVVAGEHNIEETEHTEQNRSVIRIIPHHNYNAAINKYNHDIALLELDEPLVLNSYVTPICIADKEYTNIFLKFGSGYVSGWGRVFHKGRSALVLQYLRVPLVDRATCLESTKFTIYNNMFCAGFHEGGRDSCQGDSGGPHVTEVEGTSFLTGIISWGEECAMKGKYGIYTKVSEYVNWIKNKTKLT

SEQ ID NO: 345 - protein, 415 aa, Homo sapiens
  Factor IX R318Y/R338E/T343R/R403E
YNSGKLEEFVQGNLERECMEEKCSFEEAREVFENTERTTEFWKQYVDGDQCESNPCLNGGSCKDDINSYECWCPFGFEGKNCELDVTCNIKNGRCEQFCKNSADNKVVCSCTEGYRLAENQKSCEPAVPFPCGRVSVSQTSKLTRAETVFPDVDYVNSTEAETILDNITQSTQSFNDFTRVVGGEDAKPGQFPWQVVLNGKVDAFCGGSIVNEKWIVTAAHCVETGVKITVVAGEHNIEETEHTEQKRNVIRIIPHHNYNAAINKYNHDIALLELDEPLVLNSYVTPICIADKEYTNIFLKFGSGYVSGWGRVFHKGYSALVLQYLRVPLVDRATCLESTKFRIYNNMFCAGFHEGGRDSCQGDSGGPHVTEVEGTSFLTGIISWGEECAMKGKYGIYTKVSEYVNWIKEKTKLT

SEQ ID NO: 346 - protein, 415 aa, Homo sapiens
  Factor IX Y155F/R318Y/R338E/T343R/R403E
YNSGKLEEFVQGNLERECMEEKCSFEEAREVFENTERTTEFWKQYVDGDQCESNPCLNGGSCKDDINSYECWCPFGFEGKNCELDVTCNIKNGRCEQFCKNSADNKVVCSCTEGYRLAENQKSCEPAVPFPCGRVSVSQTSKLTRAETVFPDVDFVNSTEAETILDNITQSTQSFNDFTRVVGGEDAKPGQFPWQVVLNGKVDAFCGGSIVNEKWIVTAAHCVETGVKITVVAGEHNIEETEHTEQKRNVIRIIPHHNYNAAINKYNHDIALLELDEPLVLNSYVTPICIADKEYTNIFLKFGSGYVSGWGRVFHKGYSALVLQYLRVPLVDRATCLESTKFRIYNNMFCAGFHEGGRDSCQGDSGGPHVTEVEGTSFLTGIISWGEECAMKGKYGIYTKVSEYVNWIKEKTKLT

SEQ ID NO: 347 - protein, 415 aa, Homo sapiens
  Factor IX R318Y/R338E/T343R/E410N
YNSGKLEEFVQGNLERECMEEKCSFEEAREVFENTERTTEFWKQYVDGDQCESNPCLNGGSCKDDINSYECWCPFGFEGKNCELDVTCNIKNGRCEQFCKNSADNKVVCSCTEGYRLAENQKSCEPAVPFPCGRVSVSQTSKLTRAETVFPDVDYVNSTEAETILDNITQSTQSFNDFTRVVGGEDAKPGQFPWQVVLNGKVDAFCGGSIVNEKWIVTAAHCVETGVKITVVAGEHNIEETEHTEQKRNVIRIIPHHNYNAAINKYNHDIALLELDEPLVLNSYVTPICIADKEYTNIFLKFGSGYVSGWGRVFHKGYSALVLQYLRVPLVDRATCLESTKFRIYNNMFCAGFHEGGRDSCQGDSGGPHVTEVEGTSFLTGIISWGEECAMKGKYGIYTKVSRYVNWIKNKTKLT

SEQ ID NO: 348 - protein, 415 aa, Homo sapiens
  Factor IX Y155F/R318Y/R338E/T343R/E410N
YNSGKLEEFVQGNLERECMEEKCSFEEAREVFENTERTTEFWKQYVDGDQCESNPCLNGGSCKDDINSYECWCPFGFEGKNCELDVTCNIKNGRCEQFCKNSADNKVVCSCTEGYRLAENQKSCEPAVPFPCGRVSVSQTSKLTRAETVFPDVDFVNSTEAETILDNITQSTQSFNDFTRVVGGEDAKPGQFPWQVVLNGKVDAFCGGSIVNEKWIVTAAHCVETGVKITVVAGEHNIEETEHTEQKRNVIRIIPHHNYNAAINKYNHDIALLELDEPLVLNSYVTPICIADKEYTNIFLKFGSGYVSGWGRVFHKGYSALVLQYLRVPLVDRATCLESTKFRIYNNMFCAGFHEGGRDSCQGDSGGPHVTEVEGTSFLTGIISWGEECAMKGKYGIYTKVSRYVNWIKNKTKLT

SEQ ID NO: 349 - protein, 415 aa, Homo sapiens
  Factor IX R318Y/T343R/R403E/E410N
YNSGKLEEFVQGNLERECMEEKCSFEEAREVFENTERTTEFWKQYVDGDQCESNPCLNGGSCKDDINSYECWCPFGFEGKNCELDVTCNIKNGRCEQFCKNSADNKVVCSCTEGYRLAENQKSCEPAVPFPCGRVSVSQTSKLTRAETVFPDVDYVNSTEAETILDNITQSTQSFNDFTRVVGGEDAKPGQFPWQVVLNGKVDAFCGGSIVNEKWIVTAAHCVETGVKITVVAGEHNIEETEHTEQKRNVIRIIPHHNYNAAINKYNHDIALLELDEPLVLNSYVTPICIADKEYTNIFLKFGSGYVSGWGRVFHKGYSALVLQYLRVPLVDRATCLRSTKFRIYNNMFCAGFHEGGRDSCQGDSGGPHVTEVEGTSFLTGIISWGEECAMKGKYGIYTKVSEYVNWIKNKTKLT

SEQ ID NO: 350 - protein, 415 aa, Homo sapiens
  Factor IX Y155F/R318Y/T343R/R403E/E410N
YNSGKLEEFVQGNLERECMEEKCSFEEAREVFENTERTTEFWKQYVDGDQCESNPCLNGGSCKDDINSYECWCPFGFEGKNCELDVTCNIKNGRCEQFCKNSADNKVVCSCTEGYRLAENQKSCEPAVPFPCGRVSVSQTSKLTRAETVFPDVDFVNSTEAETILDNITQSTQSFNDFTRVVGGEDAKPGQFPWQVVLNGKVDAFCGGSIVNEKWIVTAAHCVETGVKITVVAGEHNIEETEHTEQKRNVIRIIPHHNYNAAINKYNHDIALLELDEPLVLNSYVTPICIADKEYTNIFLKFGSGYVSGWGRVFHKGYSALVLQYLRVPLVDRATCLRSTKFRIYNNMFCAGFHEGGRDSCQGDSGGPHVTEVEGTSFLTGIISWGEECAMKGKYGIYTKVSEYVNWIKNKTKLT

SEQ ID NO: 351 - protein, 415 aa, Homo sapiens
  Factor IX R338E/T343R/R403E/E410N
YNSGKLEEFVQGNLERECMEEKCSFEEAREVFENTERTTEFWKQYVDGDQCESNPCLNGGSCKDDINSYECWCPFGFEGKNCELDVTCNIKNGRCEQFCKNSADNKVVCSCTEGYRLAENQKSCEPAVPFPCGRVSVSQTSKLTRAETVFPDVDYVNSTEAETILDNITQSTQSFNDFTRVVGGEDAKPGQFPWQVVLNGKVDAFCGGSIVNEKWIVTAAHCVETGVKITVVAGEHNIEETEHTEQKRNVIRIIPHHNYNAAINKYNHDIALLELDEPLVLNSYVTPICIADKEYTNIFLKFGSGYVSGWGRVFHKGRSALVLQYLRVPLVDRATCLESTKFRIYNNMFCAGFHEGGRDSCQGDSGGPHVTEVEGTSFLTGIISWGEECAMKGKYGIYTKVSEYVNWIKNKTKLT

SEQ ID NO: 352 - protein, 415 aa, Homo sapiens
  Factor IX Y155F/R338E/T343R/R403E/E410N
YNSGKLEEFVQGNLERECMEEKCSFEEAREVFENTERTTEFWKQYVDGDQCESNPCLNGGSCKDDINSYECWCPFGFEGKNCELDVTCNIKNGRCEQFCKNSADNKVVCSCTEGYRLAENQKSCEPAVPFPCGRVSVSQTSKLTRAETVFPDVDFVNSTEAETILDNITQSTQSFNDFTRVVGGEDAKPGQFPWQVVLNGKVDAFCGGSIVNEKWIVTAAHCVETGVKITVVAGEHNIEETEHTEQKRNVIRIIPHHNYNAAINKYNHDIALLELDEPLVLNSYVTPICIADKEYTNIFLKFGSGYVSGWGRVFHKGRSALVLQYLRVPLVDRATCLESTKFRIYNNMFCAGFHEGGRDSCQGDSGGPHVTEVEGTSFLTGIISWGEECAMKGKYGIYTKVSEYVNWIKNKTKLT

SEQ ID NO: 353 - protein, 415 aa, Homo sapiens
  Factor IX Y155F/K247N/N249S/R318Y/R338E/ T343R/R403E/E410N
YNSGKLEEFVQGNLERECMEEKCSFEEAREVFENTERTTEFWKQYVDGDQCESNPCLNGGSCKDDINSYECWCPFGFEGKNCELDVTCNIKNGRCEQFCKNSADNKVVCSCTEGYRLAENQKSCEPAVPFPCGRVSVSQTSKLTRAETVFPDVDFVNSTEAETILDNITQSTQSFNDFTRVVGGEDAKPGQFPWQVVLNGKVDAFCGGSIVNEKWIVTAAHCVETGVKITVVAGEHNIEETEHTEQNRSVIRIIPHHNYNAAINKYNHDIALLELDEPLVLNSYVTPICIADKEYTNIFLKFGSGYVSGWGRVFHKGYSALVLQYLRVPLVDRATCLESTKFRIYNNMFCAGFHEGGRDSCQGDSGGPHVTEVEGTSFLTGIISWGEECAMKGKYGIYTKVSEYVNWIKNKTKLT

SEQ ID NO: 354 - protein, 415 aa, Homo sapiens
  Factor IX K247N/N249S/R318Y/R338E/T343R/R403E/E410N
YNSGKLEEFVQGNLERECMEEKCSFEEAREVFENTERTTEFWKQYVDGDQCESNPCLNGGSCKDDINSYECWCPFGFEGKNCELDVTCNIKNGRCEQFCKNSADNKVVCSCTEGYRLAENQKSCEPAVPFPCGRVSVSQTSKLTRAETVFPDVDYVNSTEAETILDNITQSTQSFNDFTRVVGGEDAKPGQFPWQVVLNGKVDAFCGGSIVNEKWIVTAAHCVETGVKITVVAGEHNIEETEHTEQNRSVIRIIPHHNYNAAINKYNHDIALLELDEPLVLNSYVTPICIADKEYTNIFLKFGSGYVSGWGRVFHKGYSALVLQYLRVPLVDRATCLESTKFRIYNNMFCAGFHEGGRDSCQGDSGGPHVTEVEGTSFLTGIISWGEECAMKGKYGIYTKVSEYVNWIKNKTKLT

SEQ ID NO: 355 - protein, 415 aa, Homo sapiens
  Factor IX K228N/I251S/R318Y/R338E/R403E/E410N
YNSGKLEEFVQGNLERECMEEKCSFEEAREVFENTERTTEFWKQYVDGDQCESNPCLNGGSCKDDINSYECWCPFGFEGKNCELDVTCNIKNGRCEQFCKNSADNKVVCSCTEGYRLAENQKSCEPAVPFPCGRVSVSQTSKLTRAETVFPDVDYVNSTEAETILDNITQSTQSFNDFTRVVGGEDAKPGQFPWQVVLNGKVDAFCGGSIVNEKWIVTAAHCVETGVNITVVAGEHNIEETEHTEQKRNVSRIIPHHNYNAAINKYNHDIALLELDEPLVLNSYVTPICIADKEYTNIFLKFGSGYVSGWGRVFHKGYSALVLQYLRVPLVDRATCLESTKFTIYNNMFCAGFHEGGRDSCQGDSGGPHVTEVEGTSFLTGIISWGEECAMKGKYGIYTKVSEYVNWIKNKTKLT

SEQ ID NO: 356 - protein, 415 aa, Homo sapiens
  Factor IX Y155F/K228N/I251S/R318Y/R338E/R403E/E410N
YNSGKLEEFVQGNLERECMEEKCSFEEAREVFENTERTTEFWKQYVDGDQCESNPCLNGGSCKDDINSYECWCPFGFEGKNCELDVTCNIKNGRCEQFCKNSADNKVVCSCTEGYRLAENQKSCEPAVPFPCGRVSVSQTSKLTRAETVFPDVDFVNSTEAETILDNITQSTQSFNDFTRVVGGEDAKPGQFPWQVVLNGKVDAFCGGSIVNEKWIVTAAHCVETGVNITVVAGEHNIEETEHTEQKRNVSRIIPHHNYNAAINKYNHDIALLELDEPLVLNSYVTPICIADKEYTNIFLKFGSGYVSGWGRVFHKGYSALVLQYLRVPLVDRATCLESTKFTIYNNMFCAGFHEGGRDSCQGDSGGPHVTEVEGTSFLTGIISWGEECAMKGKYGIYTKVSEYVNWIKNKTKLT

SEQ ID NO: 357 - protein, 415 aa, Homo sapiens
  Factor IX N260S/R318Y/R338E/T343R/R403E/E410N
YNSGKLEEFVQGNLERECMEEKCSFEEAREVFENTERTTEFWKQYVDGDQCESNPCLNGGSCKDDINSYECWCPFGFEGKNCELDVTCNIKNGRCEQFCKNSADNKVVCSCTEGYRLAENQKSCEPAVPFPCGRVSVSQTSKLTRAETVFPDVDYVNSTEAETILDNITQSTQSFNDFTRVVGGEDAKPGQFPWQVVLNGKVDAFCGGSIVNEKWIVTAAHCVETGVKITVVAGEHNIEETEHTEQKRNVIRIIPHHNYSAAINKYNHDIALLELDEPLVLNSYVTPICIADKEYTNIFLKFGSGYVSGWGRVFHKGYSALVLQYLRVPLVDRATCLESTKFRIYNNMFCAGFHEGGRDSCQGDSGGPHVTEVEGTSFLTGIISWGEECAMKGKYGIYTKVSEYVNWIKNKTKLT

SEQ ID NO: 358 - protein, 415 aa, Homo sapiens
  Factor IX Y155F/N260S/R318Y/R338E/T343R/ R403E/E410N
YNSGKLEEFVQGNLERECMEEKCSFEEAREVFENTERTTEFWKQYVDGDQCESNPCLNGGSCKDDINSYECWCPFGFEGKNCELDVTCNIKNGRCEQFCKNSADNKVVCSCTEGYRLAENQKSCEPAVPFPCGRVSVSQTSKLTRAETVFPDVDFVNSTEAETILDNITQSTQSFNDFTRVVGGEDAKPGQFPWQVVLNGKVDAFCGGSIVNEKWIVTAAHCVETGVKITVVAGEHNIEETEHTEQKRNVIRIIPHHNYSAAINKYNHDIALLELDEPLVLNSYVTPICIADKEYTNIFLKFGSGYVSGWGRVFHKGYSALVLQYLRVPLVDRATCLESTKFRIYNNMFCAGFHEGGRDSCQGDSGGPHVTEVEGTSFLTGIISWGEECAMKGKYGIYTKVSEYVNWIKNKTKLT

SEQ ID NO: 359 - protein, 415 aa, Homo sapiens
  Factor IX K228N/K247N/N249S/R318Y/R338E/ T343R/R403E/E410N
YNSGKLEEFVQGNLERECMEEKCSFEEAREVFENTERTTEFWKQYVDGDQCESNPCLNGGSCKDDINSYECWCPFGFEGKNCELDVTCNIKNGRCEQFCKNSADNKVVCSCTEGYRLAENQKSCEPAVPFPCGRVSVSQTSKLTRAETVFPDVDYVNSTEAETILDNITQSTQSFNDFTRVVGGEDAKPGQFPWQVVLNGKVDAFCGGSIVNEKWIVTAAHCVETGVNITVVAGEHNIEETEHTEQNRSVIRIIPHHNYNAAINKYNHDIALLELDEPLVLNSYVTPICIADKEYTNIFLKFGSGYVSGWGRVFHKGYSALVLQYLRVPLVDRATCLESTKFRIYNNMFCAGFHEGGRDSCQGDSGGPHVTEVEGTSFLTGIISWGEECAMKGKYGIYTKVSEYVNWIKNKTKLT

SEQ ID NO: 360 - protein, 415 aa, Homo sapiens
  Factor IX Y155F/K228N/K247N/N249S/R318Y/ R338E/T343R/R403E/E410N
YNSGKLEEFVQGNLERECMEEKCSFEEAREVFENTERTTEFWKQYVDGDQCESNPCLNGGSCKDDINSYECWCPFGFEGKNCELDVTCNIKNGRCEQFCKNSADNKVVCSCTEGYRLAENQKSCEPAVPFPCGRVSVSQTSKLTRAETVFPDVDFVNSTEAETILDNITQSTQSFNDFTRVVGGEDAKPGQFPWQVVLNGKVDAFCGGSIVNEKWIVTAAHCVETGVNITVVAGEHNIEETEHTEQNRSVIRIIPHHNYNAAINKYNHDIALLELDEPLVLNSYVTPICIADKEYTNIFLKFGSGYVSGWGRVFHKGYSALVLQYLRVPLVDRATCLESTKFRIYNNMFCAGFHEGGRDSCQGDSGGPHVTEVEGTSFLTGIISWGEECAMKGKYGIYTKVSEYVNWIKNKTKLT

SEQ ID NO: 361 - protein, 415 aa, Homo sapiens
  Factor IX Y155F/R338E/T343R/R403E
YNSGKLEEFVQGNLERECMEEKCSFEEAREVFENTERTTEFWKQYVDGDQCESNPCLNGGSCKDDINSYECWCPFGFEGKNCELDVTCNIKNGRCEQFCKNSADNKVVCSCTEGYRLAENQKSCEPAVPFPCGRVSVSQTSKLTRAETVFPDVDFVNSTEAETILDNITQSTQSFNDFTRVVGGEDAKPGQFPWQVVLNGKVDAFCGGSIVNEKWIVTAAHCVETGVKITVVAGEHNIEETEHTEQKRNVIRIIPHHNYNAAINKYNHDIALLELDEPLVLNSYVTPICIADKEYTNIFLKFGSGYVSGWGRVFHKGRSALVLQYLRVPLVDRATCLESTKFRIYNNMFCAGFHEGGRDSCQGDSGGPHVTEVEGTSFLTGIISWGEECAMKGKYGIYTKVSEYVNWIKEKTKLT

SEQ ID NO: 362 - protein, 415 aa, Homo sapiens
  Factor IX R338E/T343R/R403E
YNSGKLEEFVQGNLERECMEEKCSFEEAREVFENTERTTEFWKQYVDGDQCESNPCLNGGSCKDDINSYECWCPFGFEGKNCELDVTCNIKNGRCEQFCKNSADNKVVCSCTEGYRLAENQKSCEPAVPFPCGRVSVSQTSKLTRAETVFPDVDYVNSTEAETILDNITQSTQSFNDFTRVVGGEDAKPGQFPWQVVLNGKVDAFCGGSIVNEKWIVTAAHCVETGVKITVVAGEHNIEETEHTEQKRNVIRIIPHHNYNAAINKYNHDIALLELDEPLVLNSYVTPICIADKEYTNIFLKFGSGYVSGWGRVFHKGRSALVLQYLRVPLVDRATCLESTKFRIYNNMFCAGFHEGGRDSCQGDSGGPHVTEVEGTSFLTGIISWGEECAMKGKYGIYTKVSEYVNWIKEKTKLT

SEQ ID NO: 363 - protein, 415 aa, Homo sapiens
  Factor IX Y155F/R338E/T343R/R403E/E410S
YNSGKLEEFVQGNLERECMEEKCSFEEAREVFENTERTTEFWKQYVDGDQCESNPCLNGGSCKDDINSYECWCPFGFEGKNCELDVTCNIKNGRCEQFCKNSADNKVVCSCTEGYRLAENQKSCEPAVPFPCGRVSVSQTSKLTRAETVFPDVDFVNSTEAETILDNITQSTQSFNDFTRVVGGEDAKPGQFPWQVVLNGKVDAFCGGSIVNEKWIVTAAHCVETGVKITVVAGEHNIEETEHTEQKRNVIRIIPHHNYNAAINKYNHDIALLELDEPLVLNSYVTPICIADKEYTNIFLKFGSGYVSGWGRVFHKGRSALVLQYLRVPLVDRATCLESTKFRIYNNMFCAGFHEGGRDSCQGDSGGPHVTEVEGTSFLTGIISWGEECAMKGKYGIYTKVSEYVNWIKSKTKLT

SEQ ID NO: 364 - protein, 415 aa, Homo sapiens
  Factor IX Y155F/N260S/R338E/T343R/R403E
YNSGKLEEFVQGNLERECMEEKCSFEEAREVFENTERTTEFWKQYVDGDQCESNPCLNGGSCKDDINSYECWCPFGFEGKNCELDVTCNIKNGRCEQFCKNSADNKVVCSCTEGYRLAENQKSCEPAVPFPCGRVSVSQTSKLTRAETVFPDVDFVNSTEAETILDNITQSTQSFNDFTRVVGGEDAKPGQFPWQVVLNGKVDAFCGGSIVNEKWIVTAAHCVETGVKITVVAGEHNIEETEHTEQKRNVIRIIPHHNYSAAINKYNHDIALLELDEPLVLNSYVTPICIADKEYTNIFLKFGSGYVSGWGRVFHKGRSALVLQYLRVPLVDRATCLESTKFRIYNNMFCAGFHEGGRDSCQGDSGGPHVTEVEGTSFLTGIISWGEECAMKGKYGIYTKVSEYVNWIKEKTKLT

SEQ ID NO: 365 - protein, 415 aa, Homo sapiens
  Factor IX Y155F/I251S/R338E/T343R/R403E
YNSGKLEEFVQGNLERECMEEKCSFEEAREVFENTERTTEFWKQYVDGDQCESNPCLNGGSCKDDINSYECWCPFGFEGKNCELDVTCNIKNGRCEQFCKNSADNKVVCSCTEGYRLAENQKSCEPAVPFPCGRVSVSQTSKLTRAETVFPDVDFVNSTEAETILDNITQSTQSFNDFTRVVGGEDAKPGQFPWQVVLNGKVDAFCGGSIVNEKWIVTAAHCVETGVKITVVAGEHNIEETEHTEQKRNVSRIIPHHNYNAAINKYNHDIALLELDEPLVLNSYVTPICIADKEYTNIFLKFGSGYVSGWGRVFHKGRSALVLQYLRVPLVDRATCLESTKFRIYNNMFCAGFHEGGRDSCQGDSGGPHVTEVEGTSFLTGIISWGEECAMKGKYGIYTKVSEYVNWIKEKTKLT

SEQ ID NO: 366 - protein, 415 aa, Homo sapiens
  Factor IX R318Y/R338E/T343R/R403E/E410S
YNSGKLEEFVQGNLERECMEEKCSFEEAREVFENTERTTEFWKQYVDGDQCESNPCLNGGSCKDDINSYECWCPFGFEGKNCELDVTCNIKNGRCEQFCKNSADNKVVCSCTEGYRLAENQKSCEPAVPFPCGRVSVSQTSKLTRAETVFPDVDYVNSTEAETILDNITQSTQSFNDFTRVVGGEDAKPGQFPWQVVLNGKVDAFCGGSIVNEKWIVTAAHCVETGVKITVVAGEHNIEETEHTEQKRNVIRIIPHHNYNAAINKYNHDIALLELDEPLVLNSYVTPICIADKEYTNIFLKFGSGYVSGWGRVFHKGYSALVLQYLRVPLVDRATCLESTKFRIYNNMFCAGFHEGGRDSCQGDSGGPHVTEVEGTSFLTGIISWGEECAMKGKYGIYTKVSEYVNWIKSKTKLT

SEQ ID NO: 367 - protein, 415 aa, Homo sapiens
  Factor IX Y155F/K247N/N249S/T343R/R403E
YNSGKLEEFVQGNLERECMEEKCSFEEAREVFENTERTTEFWKQYVDGDQCESNPCLNGGSCKDDINSYECWCPFGFEGKNCELDVTCNIKNGRCEQFCKNSADNKVVCSCTEGYRLAENQKSCEPAVPFPCGRVSVSQTSKLTRAETVFPDVDFVNSTEAETILDNITQSTQSFNDFTRVVGGEDAKPGQFPWQVVLNGKVDAFCGGSIVNEKWIVTAAHCVETGVKITVVAGEHNIEETEHTEQNRSVIRIIPHHNYNAAINKYNHDIALLELDEPLVLNSYVTPICIADKEYTNIFLKFGSGYVSGWGRVFHKGRSALVLQYLRVPLVDRATCLRSTKFRIYNNMFCAGFHEGGRDSCQGDSGGPHVTEVEGTSFLTGIISWGEECAMKGKYGIYTKVSEYVNWIKEKTKLT

SEQ ID NO: 368 - protein, 415 aa, Homo sapiens
  Factor IX Y155F/K247N/N249S/R318Y/R338E/T343R/R403E
YNSGKLEEFVQGNLERECMEEKCSFEEAREVFENTERTTEFWKQYVDGDQCESNPCLNGGSCKDDINSYECWCPFGFEGKNCELDVTCNIKNGRCEQFCKNSADNKVVCSCTEGYRLAENQKSCEPAVPFPCGRVSVSQTSKLTRAETVFPDVDFVNSTEAETILDNITQSTQSFNDFTRVVGGEDAKPGQFPWQVVLNGKVDAFCGGSIVNEKWIVTAAHCVETGVKITVVAGEHNIEETEHTEQNRSVIRIIPHHNYNAAINKYNHDIALLELDEPLVLNSYVTPICIADKEYTNIFLKFGSGYVSGWGRVFHKGYSALVLQYLRVPLVDRATCLESTKFRIYNNMFCAGFHEGGRDSCQGDSGGPHVTEVEGTSFLTGIISWGEECAMKGKYGIYTKVSEYVNWIKEKTKLT

SEQ ID NO: 369 - protein, 415 aa, Homo sapiens
  Factor IX K247N/N249S/R318Y/R338E/T343R/R403E
YNSGKLEEFVQGNLERECMEEKCSFEEAREVFENTERTTEFWKQYVDGDQCESNPCLNGGSCKDDINSYECWCPFGFEGKNCELDVTCNIKNGRCEQFCKNSADNKVVCSCTEGYRLAENQKSCEPAVPFPCGRVSVSQTSKLTRAETVFPDVDYVNSTEAETILDNITQSTQSFNDFTRVVGGEDAKPGQFPWQVVLNGKVDAFCGGSIVNEKWIVTAAHCVETGVKITVVAGEHNIEETEHTEQNRSVIRIIPHHNYNAAINKYNHDIALLELDEPLVLNSYVTPICIADKEYTNIFLKFGSGYVSGWGRVFHKGYSALVLQYLRVPLVDRATCLESTKFRIYNNMFCAGFHEGGRDSCQGDSGGPHVTEVEGTSFLTGIISWGEECAMKGKYGIYTKVSEYVNWIKEKTKLT

SEQ ID NO: 370 - protein, 415 aa, Homo sapiens
  Factor IX Y155F/K247N/N249S/R338E/T343R/ R403E/E410N
YNSGKLEEFVQGNLERECMEEKCSFEEAREVFENTERTTEFWKQYVDGDQCESNPCLNGGSCKDDINSYECWCPFGFEGKNCELDVTCNIKNGRCEQFCKNSADNKVVCSCTEGYRLAENQKSCEPAVPFPCGRVSVSQTSKLTRAETVFPDVDFVNSTEAETILDNITQSTQSFNDFTRVVGGEDAKPGQFPWQVVLNGKVDAFCGGSIVNEKWIVTAAHCVETGVKITVVAGEHNIEETEHTEQNRSVIRIIPHHNYNAAINKYNHDIALLELDEPLVLNSYVTPICIADKEYTNIFLKFGSGYVSGWGRVFHKGRSALVLQYLRVPLVDRATCLESTKFRIYNNMFCAGFHEGGRDSCQGDSGGPHVTEVEGTSFLTGIISWGEECAMKGKYGIYTKVSEYVNWIKNKTKLT

SEQ ID NO: 371 - protein, 415 aa, Homo sapiens
  Factor IX K247N/N249S/R338E/T343R/R403E/E410N
YNSGKLEEFVQGNLERECMEEKCSFEEAREVFENTERTTEFWKQYVDGDQCESNPCLNGGSCKDDINSYECWCPFGFEGKNCELDVTCNIKNGRCEQFCKNSADNKVVCSCTEGYRLAENQKSCEPAVPFPCGRVSVSQTSKLTRAETVFPDVDYVNSTEAETILDNITQSTQSFNDFTRVVGGEDAKPGQFPWQVVLNGKVDAFCGGSIVNEKWIVTAAHCVETGVKITVVAGEHNIEETEHTEQNRSVIRIIPHHNYNAAINKYNHDIALLELDEPLVLNSYVTPICIADKEYTNIFLKFGSGYVSGWGRVFHKGRSALVLQYLRVPLVDRATCLESTKFRIYNNMFCAGFHEGGRDSCQGDSGGPHVTEVEGTSFLTGIISWGEECAMKGKYGIYTKVSEYVNWIKNKTKLT

SEQ ID NO: 372 - protein, 415 aa, Homo sapiens
  Factor IX Y155F/K247N/N249S/R318Y/R338E
YNSGKLEEFVQGNLERECMEEKCSFEEAREVFENTERTTEFWKQYVDGDQCESNPCLNGGSCKDDINSYECWCPFGFEGKNCELDVTCNIKNGRCEQFCKNSADNKVVCSCTEGYRLAENQKSCEPAVPFPCGRVSVSQTSKLTRAETVFPDVDFVNSTEAETILDNITQSTQSFNDFTRVVGGEDAKPGQFPWQVVLNGKVDAFCGGSIVNEKWIVTAAHCVETGVKITVVAGEHNIEETEHTEQNRSVIRIIPHHNYNAAINKYNHDIALLELDEPLVLNSYVTPICIADKEYTNIFLKFGSGYVSGWGRVFHKGYSALVLQYLRVPLVDRATCLESTKFTIYNNMFCAGFHEGGRDSCQGDSGGPHVTEVEGTSFLTGIISWGEECAMKGKYGIYTKVSRYVNWIKEKTKLT

SEQ ID NO: 373 - protein, 415 aa, Homo sapiens
  Factor IX Y155F/K247N/N249S/R318Y/T343R
YNSGKLEEFVQGNLERECMEEKCSFEEAREVFENTERTTEFWKQYVDGDQCESNPCLNGGSCKDDINSYECWCPFGFEGKNCELDVTCNIKNGRCEQFCKNSADNKVVCSCTEGYRLAENQKSCEPAVPFPCGRVSVSQTSKLTRAETVFPDVDFVNSTEAETILDNITQSTQSFNDFTRVVGGEDAKPGQFPWQVVLNGKVDAFCGGSIVNEKWIVTAAHCVETGVKITVVAGEHNIEETEHTEQNRSVIRIIPHHNYNAAINKYNHDIALLELDEPLVLNSYVTPICIADKEYTNIFLKFGSGYVSGWGRVFHKGYSALVLQYLRVPLVDRATCLRSTKFRIYNNMFCAGFHEGGRDSCQGDSGGPHVTEVEGTSFLTGIISWGEECAMKGKYGIYTKVSRYVNWIKEKTKLT

SEQ ID NO: 374 - protein, 415 aa, Homo sapiens
  Factor IX Y155F/K247N/N249S/R318Y/R403E
YNSGKLEEFVQGNLERECMEEKCSFEEAREVFENTERTTEFWKQYVDGDQCESNPCLNGGSCKDDINSYECWCPFGFEGKNCELDVTCNIKNGRCEQFCKNSADNKVVCSCTEGYRLAENQKSCEPAVPFPCGRVSVSQTSKLTRAETVFPDVDFVNSTEAETILDNITQSTQSFNDFTRVVGGEDAKPGQFPWQVVLNGKVDAFCGGSIVNEKWIVTAAHCVETGVKITVVAGEHNIEETEHTEQNRSVIRIIPHHNYNAAINKYNHDIALLELDEPLVLNSYVTPICIADKEYTNIFLKFGSGYVSGWGRVFHKGYSALVLQYLRVPLVDRATCLRSTKFTIYNNMFCAGFHEGGRDSCQGDSGGPHVTEVEGTSFLTGIISWGEECAMKGKYGIYTKVSEYVNWIKEKTKLT

SEQ ID NO: 375 - protein, 415 aa, Homo sapiens
  Factor IX Y155F/K247N/N249S/R318Y/E410N
YNSGKLEEFVQGNLERECMEEKCSFEEAREVFENTERTTEFWKQYVDGDQCESNPCLNGGSCKDDINSYECWCPFGFEGKNCELDVTCNIKNGRCEQFCKNSADNKVVCSCTEGYRLAENQKSCEPAVPFPCGRVSVSQTSKLTRAETVFPDVDFVNSTEAETILDNITQSTQSFNDFTRVVGGEDAKPGQFPWQVVLNGKVDAFCGGSIVNEKWIVTAAHCVETGVKITVVAGEHNIEETEHTEQNRSVIRIIPHHNYNAAINKYNHDIALLELDEPLVLNSYVTPICIADKEYTNIFLKFGSGYVSGWGRVFHKGYSALVLQYLRVPLVDRATCLRSTKFTIYNNMFCAGFHEGGRDSCQGDSGGPHVTEVEGTSFLTGIISWGEECAMKGKYGIYTKVSRYVNWIKNKTKLT

SEQ ID NO: 376 - protein, 415 aa, Homo sapiens
  Factor IX Y155F/K247N/N249S/R338E/R403E
YNSGKLEEFVQGNLERECMEEKCSFEEAREVFENTERTTEFWKQYVDGDQCESNPCLNGGSCKDDINSYECWCPFGFEGKNCELDVTCNIKNGRCEQFCKNSADNKVVCSCTEGYRLAENQKSCEPAVPFPCGRVSVSQTSKLTRAETVFPDVDFVNSTEAETILDNITQSTQSFNDFTRVVGGEDAKPGQFPWQVVLNGKVDAFCGGSIVNEKWIVTAAHCVETGVKITVVAGEHNIEETEHTEQNRSVIRIIPHHNYNAAINKYNHDIALLELDEPLVLNSYVTPICIADKEYTNIFLKFGSGYVSGWGRVFHKGRSALVLQYLRVPLVDRATCLESTKFTIYNNMFCAGFHEGGRDSCQGDSGGPHVTEVEGTSFLTGIISWGEECAMKGKYGIYTKVSEYVNWIKEKTKLT

SEQ ID NO: 377 - protein, 415 aa, Homo sapiens
  Factor IX Y155F/K247N/N249S/R338E/T343R
YNSGKLEEFVQGNLERECMEEKCSFEEAREVFENTERTTEFWKQYVDGDQCESNPCLNGGSCKDDINSYECWCPFGFEGKNCELDVTCNIKNGRCEQFCKNSADNKVVCSCTEGYRLAENQKSCEPAVPFPCGRVSVSQTSKLTRAETVFPDVDFVNSTEAETILDNITQSTQSFNDFTRVVGGEDAKPGQFPWQVVLNGKVDAFCGGSIVNEKWIVTAAHCVETGVKITVVAGEHNIEETEHTEQNRSVIRIIPHHNYNAAINKYNHDIALLELDEPLVLNSYVTPICIADKEYTNIFLKFGSGYVSGWGRVFHKGRSALVLQYLRVPLVDRATCLESTKFRIYNNMFCAGFHEGGRDSCQGDSGGPHVTEVEGTSFLTGIISWGEECAMKGKYGIYTKVSRYVNWIKEKTKLT

SEQ ID NO: 378 - protein, 415 aa, Homo sapiens
  Factor IX Y155F/K247N/N249S/R318Y/R338E/T343R/E410N
YNSGKLEEFVQGNLERECMEEKCSFEEAREVFENTERTTEFWKQYVDGDQCESNPCLNGGSCKDDINSYECWCPFGFEGKNCELDVTCNIKNGRCEQFCKNSADNKVVCSCTEGYRLAENQKSCEPAVPFPCGRVSVSQTSKLTRAETVFPDVDFVNSTEAETILDNITQSTQSFNDFTRVVGGEDAKPGQFPWQVVLNGKVDAFCGGSIVNEKWIVTAAHCVETGVKITVVAGEHNIEETEHTEQNRSVIRIIPHHNYNAAINKYNHDIALLELDEPLVLNSYVTPICIADKEYTNIFLKFGSGYVSGWGRVFHKGYSALVLQYLRVPLVDRATCLESTKFRIYNNMFCAGFHEGGRDSCQGDSGGPHVTEVEGTSFLTGIISWGEECAMKGKYGIYTKVSRYVNWIKNKTKLT

SEQ ID NO: 379 - protein, 415 aa, Homo sapiens
  Factor IX K247N/N249S/R318Y/R338E/T343R/ E410N
YNSGKLEEFVQGNLERECMEEKCSFEEAREVFENTERTTEFWKQYVDGDQCESNPCLNGGSCKDDINSYECWCPFGFEGKNCELDVTCNIKNGRCEQFCKNSADNKVVCSCTEGYRLAENQKSCEPAVPFPCGRVSVSQTSKLTRAETVFPDVDYVNSTEAETILDNITQSTQSFNDFTRVVGGEDAKPGQFPWQVVLNGKVDAFCGGSIVNEKWIVTAAHCVETGVKITVVAGEHNIEETEHTEQNRSVIRIIPHHNYNAAINKYNHDIALLELDEPLVLNSYVTPICIADKEYTNIFLKFGSGYVSGWGRVFHKGYSALVLQYLRVPLVDRATCLESTKFRIYNNMFCAGFHEGGRDSCQGDSGGPHVTEVEGTSFLTGIISWGEECAMKGKYGIYTKVSRYVNWIKNKTKLT

SEQ ID NO: 380 - protein, 415 aa, Homo sapiens
  Factor IX Y155F/K247N/N249S/R318Y/T343R/R403E/E410N
YNSGKLEEFVQGNLERECMEEKCSFEEAREVFENTERTTEFWKQYVDGDQCESNPCLNGGSCKDDINSYECWCPFGFEGKNCELDVTCNIKNGRCEQFCKNSADNKVVCSCTEGYRLAENQKSCEPAVPFPCGRVSVSQTSKLTRAETVFPDVDFVNSTEAETILDNITQSTQSFNDFTRVVGGEDAKPGQFPWQVVLNGKVDAFCGGSIVNEKWIVTAAHCVETGVKITVVAGEHNIEETEHTEQNRSVIRIIPHHNYNAAINKYNHDIALLELDEPLVLNSYVTPICIADKEYTNIFLKFGSGYVSGWGRVFHKGYSALVLQYLRVPLVDRATCLRSTKFRIYNNMFCAGFHEGGRDSCQGDSGGPHVTEVEGTSFLTGIISWGEECAMKGKYGIYTKVSEYVNWIKNKTKLT

SEQ ID NO: 381 - protein, 415 aa, Homo sapiens
  Factor IX K247N/N249S/R318Y/T343R/R403E/E410N
YNSGKLEEFVQGNLERECMEEKCSFEEAREVFENTERTTEFWKQYVDGDQCESNPCLNGGSCKDDINSYECWCPFGFEGKNCELDVTCNIKNGRCEQFCKNSADNKVVCSCTEGYRLAENQKSCEPAVPFPCGRVSVSQTSKLTRAETVFPDVDYVNSTEAETILDNITQSTQSFNDFTRVVGGEDAKPGQFPWQVVLNGKVDAFCGGSIVNEKWIVTAAHCVETGVKITVVAGEHNIEETEHTEQNRSVIRIIPHHNYNAAINKYNHDIALLELDEPLVLNSYVTPICIADKEYTNIFLKFGSGYVSGWGRVFHKGYSALVLQYLRVPLVDRATCLRSTKFRIYNNMFCAGFHEGGRDSCQGDSGGPHVTEVEGTSFLTGIISWGEECAMKGKYGIYTKVSEYVNWIKNKTKLT

SEQ ID NO: 382 - protein, 415 aa, Homo sapiens
  Factor IX Y155F/K247N/N249S/R338E/E410N
YNSGKLEEFVQGNLERECMEEKCSFEEAREVFENTERTTEFWKQYVDGDQCESNPCLNGGSCKDDINSYECWCPFGFEGKNCELDVTCNIKNGRCEQFCKNSADNKVVCSCTEGYRLAENQKSCEPAVPFPCGRVSVSQTSKLTRAETVFPDVDFVNSTEAETILDNITQSTQSFNDFTRVVGGEDAKPGQFPWQVVLNGKVDAFCGGSIVNEKWIVTAAHCVETGVKITVVAGEHNIEETEHTEQNRSVIRIIPHHNYNAAINKYNHDIALLELDEPLVLNSYVTPICIADKEYTNIFLKFGSGYVSGWGRVFHKGRSALVLQYLRVPLVDRATCLESTKFTIYNNMFCAGFHEGGRDSCQGDSGGPHVTEVEGTSFLTGIISWGEECAMKGKYGIYTKVSRYVNWIKNKTKLT

SEQ ID NO: 383 - protein, 415 aa, Homo sapiens
  Factor IX Y155F/K247N/N249S/R318Y/T343R/ R403E
YNSGKLEEFVQGNLERECMEEKCSFEEAREVFENTERTTEFWKQYVDGDQCESNPCLNGGSCKDDINSYECWCPFGFEGKNCELDVTCNIKNGRCEQFCKNSADNKVVCSCTEGYRLAENQKSCEPAVPFPCGRVSVSQTSKLTRAETVFPDVDFVNSTEAETILDNITQSTQSFNDFTRVVGGEDAKPGQFPWQVVLNGKVDAFCGGSIVNEKWIVTAAHCVETGVKITVVAGEHNIEETEHTEQNRSVIRIIPHHNYNAAINKYNHDIALLELDEPLVLNSYVTPICIADKEYTNIFLKFGSGYVSGWGRVFHKGYSALVLQYLRVPLVDRATCLRSTKFRIYNNMFCAGFHEGGRDSCQGDSGGPHVTEVEGTSFLTGIISWGEECAMKGKYGIYTKVSEYVNWIKEKTKLT

SEQ ID NO: 384 - protein, 415 aa, Homo sapiens
  Factor IX K247N/N249S/R318Y/T343R/R403E
YNSGKLEEFVQGNLERECMEEKCSFEEAREVFENTERTTEFWKQYVDGDQCESNPCLNGGSCKDDINSYECWCPFGFEGKNCELDVTCNIKNGRCEQFCKNSADNKVVCSCTEGYRLAENQKSCEPAVPFPCGRVSVSQTSKLTRAETVFPDVDYVNSTEAETILDNITQSTQSFNDFTRVVGGEDAKPGQFPWQVVLNGKVDAFCGGSIVNEKWIVTAAHCVETGVKITVVAGEHNIEETEHTEQNRSVIRIIPHHNYNAAINKYNHDIALLELDEPLVLNSYVTPICIADKEYTNIFLKFGSGYVSGWGRVFHKGYSALVLQYLRVPLVDRATCLRSTKFRIYNNMFCAGFHEGGRDSCQGDSGGPHVTEVEGTSFLTGIISWGEECAMKGKYGIYTKVSEYVNWIKEKTKLT

SEQ ID NO: 385 - protein, 415 aa, Homo sapiens
  Factor IX Y155F/K247N/N249S/R318Y/T343R/E410N
YNSGKLEEFVQGNLERECMEEKCSFEEAREVFENTERTTEFWKQYVDGDQCESNPCLNGGSCKDDINSYECWCPFGFEGKNCELDVTCNIKNGRCEQFCKNSADNKVVCSCTEGYRLAENQKSCEPAVPFPCGRVSVSQTSKLTRAETVFPDVDFVNSTEAETILDNITQSTQSFNDFTRVVGGEDAKPGQFPWQVVLNGKVDAFCGGSIVNEKWIVTAAHCVETGVKITVVAGEHNIEETEHTEQNRSVIRIIPHHNYNAAINKYNHDIALLELDEPLVLNSYVTPICIADKEYTNIFLKFGSGYVSGWGRVFHKGYSALVLQYLRVPLVDRATCLRSTKFRIYNNMFCAGFHEGGRDSCQGDSGGPHVTEVEGTSFLTGIISWGEECAMKGKYGIYTKVSRYVNWIKNKTKLT

SEQ ID NO: 386 - protein, 415 aa, Homo sapiens
  Factor IX K247N/N249S/R318Y/T343R/E410N
YNSGKLEEFVQGNLERECMEEKCSFEEAREVFENTERTTEFWKQYVDGDQCESNPCLNGGSCKDDINSYECWCPFGFEGKNCELDVTCNIKNGRCEQFCKNSADNKVVCSCTEGYRLAENQKSCEPAVPFPCGRVSVSQTSKLTRAETVFPDVDYVNSTEAETILDNITQSTQSFNDFTRVVGGEDAKPGQFPWQVVLNGKVDAFCGGSIVNEKWIVTAAHCVETGVKITVVAGEHNIEETEHTEQNRSVIRIIPHHNYNAAINKYNHDIALLELDEPLVLNSYVTPICIADKEYTNIFLKFGSGYVSGWGRVFHKGYSALVLQYLRVPLVDRATCLRSTKFRIYNNMFCAGFHEGGRDSCQGDSGGPHVTEVEGTSFLTGIISWGEECAMKGKYGIYTKVSRYVNWIKNKTKLT

SEQ ID NO: 387 - protein, 415 aa, Homo sapiens
  Factor IX Y155F/K247N/N249S/R338E/T343R/ R403E
YNSGKLEEFVQGNLERECMEEKCSFEEAREVFENTERTTEFWKQYVDGDQCESNPCLNGGSCKDDINSYECWCPFGFEGKNCELDVTCNIKNGRCEQFCKNSADNKVVCSCTEGYRLAENQKSCEPAVPFPCGRVSVSQTSKLTRAETVFPDVDFVNSTEAETILDNITQSTQSFNDFTRVVGGEDAKPGQFPWQVVLNGKVDAFCGGSIVNEKWIVTAAHCVETGVKITVVAGEHNIEETEHTEQNRSVIRIIPHHNYNAAINKYNHDIALLELDEPLVLNSYVTPICIADKEYTNIFLKFGSGYVSGWGRVFHKGRSALVLQYLRVPLVDRATCLESTKFRIYNNMFCAGFHEGGRDSCQGDSGGPHVTEVEGTSFLTGIISWGEECAMKGKYGIYTKVSEYVNWIKEKTKLT

SEQ ID NO: 388 - protein, 415 aa, Homo sapiens
  Factor IX K247N/N249S/R338E/T343R/R403E
YNSGKLEEFVQGNLERECMEEKCSFEEAREVFENTERTTEFWKQYVDGDQCESNPCLNGGSCKDDINSYECWCPFGFEGKNCELDVTCNIKNGRCEQFCKNSADNKVVCSCTEGYRLAENQKSCEPAVPFPCGRVSVSQTSKLTRAETVFPDVDYVNSTEAETILDNITQSTQSFNDFTRVVGGEDAKPGQFPWQVVLNGKVDAFCGGSIVNEKWIVTAAHCVETGVKITVVAGEHNIEETEHTEQNRSVIRIIPHHNYNAAINKYNHDIALLELDEPLVLNSYVTPICIADKEYTNIFLKFGSGYVSGWGRVFHKGRSALVLQYLRVPLVDRATCLESTKFRIYNNMFCAGFHEGGRDSCQGDSGGPHVTEVEGTSFLTGIISWGEECAMKGKYGIYTKVSEYVNWIKEKTKLT

SEQ ID NO: 389 - protein, 415 aa, Homo sapiens
  Factor IX  Y155F/K247N/N249S/R338E/T343R/ E410N
YNSGKLEEFVQGNLERECMEEKCSFEEAREVFENTERTTEFWKQYVDGDQCESNPCLNGGSCKDDINSYECWCPFGFEGKNCELDVTCNIKNGRCEQFCKNSADNKVVCSCTEGYRLAENQKSCEPAVPFPCGRVSVSQTSKLTRAETVFPDVDFVNSTEAETILDNITQSTQSFNDFTRVVGGEDAKPGQFPWQVVLNGKVDAFCGGSIVNEKWIVTAAHCVETGVKITVVAGEHNIEETEHTEQNRSVIRIIPHHNYNAAINKYNHDIALLELDEPLVLNSYVTPICIADKEYTNIFLKFGSGYVSGWGRVFHKGRSALVLQYLRVPLVDRATCLESTKFRIYNNMFCAGFHEGGRDSCQGDSGGPHVTEVEGTSFLTGIISWGEECAMKGKYGIYTKVSRYVNWIKNKTKLT

SEQ ID NO: 390 - protein, 415 aa, Homo sapiens
  Factor IX  K247N/N249S/R338E/T343R/E410N
YNSGKLEEFVQGNLERECMEEKCSFEEAREVFENTERTTEFWKQYVDGDQCESNPCLNGGSCKDDINSYECWCPFGFEGKNCELDVTCNIKNGRCEQFCKNSADNKVVCSCTEGYRLAENQKSCEPAVPFPCGRVSVSQTSKLTRAETVFPDVDYVNSTEAETILDNITQSTQSFNDFTRVVGGEDAKPGQFPWQVVLNGKVDAFCGGSIVNEKWIVTAAHCVETGVKITVVAGEHNIEETEHTEQNRSVIRIIPHHNYNAAINKYNHDIALLELDEPLVLNSYVTPICIADKEYTNIFLKFGSGYVSGWGRVFHKGRSALVLQYLRVPLVDRATCLESTKFRIYNNMFCAGFHEGGRDSCQGDSGGPHVTEVEGTSFLTGIISWGEECAMKGKYGIYTKVSRYVNWIKNKTKLT

SEQ ID NO: 391 - protein, 415 aa, Homo sapiens
  Factor IX  Y155F/K247N/N249S/T343R/R403E/ E410N
YNSGKLEEFVQGNLERECMEEKCSFEEAREVFENTERTTEFWKQYVDGDQCESNPCLNGGSCKDDINSYECWCPFGFEGKNCELDVTCNIKNGRCEQFCKNSADNKVVCSCTEGYRLAENQKSCEPAVPFPCGRVSVSQTSKLTRAETVFPDVDFVNSTEAETILDNITQSTQSFNDFTRVVGGEDAKPGQFPWQVVLNGKVDAFCGGSIVNEKWIVTAAHCVETGVKITVVAGEHNIEETEHTEQNRSVIRIIPHHNYNAAINKYNHDIALLELDEPLVLNSYVTPICIADKEYTNIFLKFGSGYVSGWGRVFHKGRSALVLQYLRVPLVDRATCLRSTKFRIYNNMFCAGFHEGGRDSCQGDSGGPHVTEVEGTSFLTGIISWGEECAMKGKYGIYTKVSEYVNWIKNKTKLT

SEQ ID NO: 392 - protein, 415 aa, Homo sapiens
  Factor IX  K247N/N249S/T343R/R403E/E410N
YNSGKLEEFVQGNLERECMEEKCSFEEAREVFENTERTTEFWKQYVDGDQCESNPCLNGGSCKDDINSYECWCPFGFEGKNCELDVTCNIKNGRCEQFCKNSADNKVVCSCTEGYRLAENQKSCEPAVPFPCGRVSVSQTSKLTRAETVFPDVDYVNSTEAETILDNITQSTQSFNDFTRVVGGEDAKPGQFPWQVVLNGKVDAFCGGSIVNEKWIVTAAHCVETGVKITVVAGEHNIEETEHTEQNRSVIRIIPHHNYNAAINKYNHDIALLELDEPLVLNSYVTPICIADKEYTNIFLKFGSGYVSGWGRVFHKGRSALVLQYLRVPLVDRATCLRSTKFRIYNNMFCAGFHEGGRDSCQGDSGGPHVTEVEGTSFLTGIISWGEECAMKGKYGIYTKVSEYVNWIKNKTKLT

SEQ ID NO: 393 - protein, 415 aa, Homo sapiens
  Factor IX  Y155F/R318Y/R338E/T343R
YNSGKLEEFVQGNLERECMEEKCSFEEAREVFENTERTTEFWKQYVDGDQCESNPCLNGGSCKDDINSYECWCPFGFEGKNCELDVTCNIKNGRCEQFCKNSADNKVVCSCTEGYRLAENQKSCEPAVPFPCGRVSVSQTSKLTRAETVFPDVDFVNSTEAETILDNITQSTQSFNDFTRVVGGEDAKPGQFPWQVVLNGKVDAFCGGSIVNEKWIVTAAHCVETGVKITVVAGEHNIEETEHTEQKRNVIRIIPHHNYNAAINKYNHDIALLELDEPLVLNSYVTPICIADKEYTNIFLKFGSGYVSGWGRVFHKGYSALVLQYLRVPLVDRATCLESTKFRIYNNMFCAGFHEGGRDSCQGDSGGPHVTEVEGTSFLTGIISWGEECAMKGKYGIYTKVSRYVNWIKEKTKLT

SEQ ID NO: 394 - protein, 415 aa, Homo sapiens
  Factor IX  R318Y/R338E/T343R
YNSGKLEEFVQGNLERECMEEKCSFEEAREVFENTERTTEFWKQYVDGDQCESNPCLNGGSCKDDINSYECWCPFGFEGKNCELDVTCNIKNGRCEQFCKNSADNKVVCSCTEGYRLAENQKSCEPAVPFPCGRVSVSQTSKLTRAETVFPDVDYVNSTEAETILDNITQSTQSFNDFTRVVGGEDAKPGQFPWQVVLNGKVDAFCGGSIVNEKWIVTAAHCVETGVKITVVAGEHNIEETEHTEQKRNVIRIIPHHNYNAAINKYNHDIALLELDEPLVLNSYVTPICIADKEYTNIFLKFGSGYVSGWGRVFHKGYSALVLQYLRVPLVDRATCLESTKFRIYNNMFCAGFHEGGRDSCQGDSGGPHVTEVEGTSFLTGIISWGEECAMKGKYGIYTKVSRYVNWIKEKTKLT

SEQ ID NO: 395 - protein, 415 aa, Homo sapiens
  Factor IX  Y155F/R318Y/T343R/R403E
YNSGKLEEFVQGNLERECMEEKCSFEEAREVFENTERTTEFWKQYVDGDQCESNPCLNGGSCKDDINSYECWCPFGFEGKNCELDVTCNIKNGRCEQFCKNSADNKVVCSCTEGYRLAENQKSCEPAVPFPCGRVSVSQTSKLTRAETVFPDVDFVNSTEAETILDNITQSTQSFNDFTRVVGGEDAKPGQFPWQVVLNGKVDAFCGGSIVNEKWIVTAAHCVETGVKITVVAGEHNIEETEHTEQKRNVIRIIPHHNYNAAINKYNHDIALLELDEPLVLNSYVTPICIADKEYTNIFLKFGSGYVSGWGRVFHKGYSALVLQYLRVPLVDRATCLRSTKFRIYNNMFCAGFHEGGRDSCQGDSGGPHVTEVEGTSFLTGIISWGEECAMKGKYGIYTKVSEYVNWIKEKTKLT

SEQ ID NO: 396 - protein, 415 aa, Homo sapiens
  Factor IX  Y155F/T343R/R403E/E410N
YNSGKLEEFVQGNLERECMEEKCSFEEAREVFENTERTTEFWKQYVDGDQCESNPCLNGGSCKDDINSYECWCPFGFEGKNCELDVTCNIKNGRCEQFCKNSADNKVVCSCTEGYRLAENQKSCEPAVPFPCGRVSVSQTSKLTRAETVFPDVDFVNSTEAETILDNITQSTQSFNDFTRVVGGEDAKPGQFPWQVVLNGKVDAFCGGSIVNEKWIVTAAHCVETGVKITVVAGEHNIEETEHTEQKRNVIRIIPHHNYNAAINKYNHDIALLELDEPLVLNSYVTPICIADKEYTNIFLKFGSGYVSGWGRVFHKGRSALVLQYLRVPLVDRATCLRSTKFRIYNNMFCAGFHEGGRDSCQGDSGGPHVTEVEGTSFLTGIISWGEECAMKGKYGIYTKVSEYVNWIKNKTKLT

SEQ ID NO: 397 - protein, 415 aa, Homo sapiens
  Factor IX  Y155F/K247N/N249S/R318Y/R338E/ T343R
YNSGKLEEFVQGNLERECMEEKCSFEEAREVFENTERTTEFWKQYVDGDQCESNPCLNGGSCKDDINSYECWCPFGFEGKNCELDVTCNIKNGRCEQFCKNSADNKVVCSCTEGYRLAENQKSCEPAVPFPCGRVSVSQTSKLTRAETVFPDVDFVNSTEAETILDNITQSTQSFNDFTRVVGGEDAKPGQFPWQVVLNGKVDAFCGGSIVNEKWIVTAAHCVETGVKITVVAGEHNIEETEHTEQNRSVIRIIPHHNYNAAINKYNHDIALLELDEPLVLNSYVTPICIADKEYTNIFLKFGSGYVSGWGRVFHKGYSALVLQYLRVPLVDRATCLESTKFRIYNNMFCAGFHEGGRDSCQGDSGGPHVTEVEGTSFLTGIISWGEECAMKGKYGIYTKVSRYVNWIKEKTKLT

SEQ ID NO: 398 - protein, 415 aa, Homo sapiens
  Factor IX K247N/N249S/R318Y/R338E/T343R
YNSGKLEEFVQGNLERECMEEKCSFEEAREVFENTERTTEFWKQYVDGDQCESNPCLNGGSCKDDINSYECWCPFGFEGKNCELDVTCNIKNGRCEQFCKNSADNKVVCSCTEGYRLAENQKSCEPAVPFPCGRVSVSQTSKLTRAETVFPDVDYVNSTEAETILDNITQSTQSFNDFTRVVGGEDAKPGQFPWQVVLNGKVDAFCGGSIVNEKWIVTAAHCVETGVKITVVAGEHNIEETEHTEQNRSVIRIIPHHNYNAAINKYNHDIALLELDEPLVLNSYVTPICIADKEYTNIFLKFGSGYVSGWGRVFHKGYSALVLQYLRVPLVDRATCLESTKFRIYNNMFCAGFHEGGRDSCQGDSGGPHVTEVEGTSFLTGIISWGEECAMKGKYGIYTKVSRYVNWIKEKTKLT

SEQ ID NO: 399 - protein, 415 aa, Homo sapiens
  Factor IX Y155F/K247N/N249S/T343R/E410N
YNSGKLEEFVQGNLERECMEEKCSFEEAREVFENTERTTEFWKQYVDGDQCESNPCLNGGSCKDDINSYECWCPFGFEGKNCELDVTCNIKNGRCEQFCKNSADNKVVCSCTEGYRLAENQKSCEPAVPFPCGRVSVSQTSKLTRAETVFPDVDFVNSTEAETILDNITQSTQSFNDFTRVVGGEDAKPGQFPWQVVLNGKVDAFCGGSIVNEKWIVTAAHCVETGVKITVVAGEHNIEETEHTEQNRSVIRIIPHHNYNAAINKYNHDIALLELDEPLVLNSYVTPICIADKEYTNIFLKFGSGYVSGWGRVFHKGRSALVLQYLRVPLVDRATCLRSTKFRIYNNMFCAGFHEGGRDSCQGDSGGPHVTEVEGTSFLTGIISWGEECAMKGKYGIYTKVSRYVNWIKNKTKLT

SEQ ID NO: 400 - protein, 415 aa, Homo sapiens
  Factor IX Y155F/K247N/N249S/R403E/E410N
YNSGKLEEFVQGNLERECMEEKCSFEEAREVFENTERTTEFWKQYVDGDQCESNPCLNGGSCKDDINSYECWCPFGFEGKNCELDVTCNIKNGRCEQFCKNSADNKVVCSCTEGYRLAENQKSCEPAVPFPCGRVSVSQTSKLTRAETVFPDVDFVNSTEAETILDNITQSTQSFNDFTRVVGGEDAKPGQFPWQVVLNGKVDAFCGGSIVNEKWIVTAAHCVETGVKITVVAGEHNIEETEHTEQNRSVIRIIPHHNYNAAINKYNHDIALLELDEPLVLNSYVTPICIADKEYTNIFLKFGSGYVSGWGRVFHKGRSALVLQYLRVPLVDRATCLRSTKFTIYNNMFCAGFHEGGRDSCQGDSGGPHVTEVEGTSFLTGIISWGEECAMKGKYGIYTKVSEYVNWIKNKTKLT

SEQ ID NO: 401 - protein, 415 aa, Homo sapiens
  Factor IX Y155F/R338E/T343R/E410N
YNSGKLEEFVQGNLERECMEEKCSFEEAREVFENTERTTEFWKQYVDGDQCESNPCLNGGSCKDDINSYECWCPFGFEGKNCELDVTCNIKNGRCEQFCKNSADNKVVCSCTEGYRLAENQKSCEPAVPFPCGRVSVSQTSKLTRAETVFPDVDFVNSTEAETILDNITQSTQSFNDFTRVVGGEDAKPGQFPWQVVLNGKVDAFCGGSIVNEKWIVTAAHCVETGVKITVVAGEHNIEETEHTEQKRNVIRIIPHHNYNAAINKYNHDIALLELDEPLVLNSYVTPICIADKEYTNIFLKFGSGYVSGWGRVFHKGRSALVLQYLRVPLVDRATCLESTKFRIYNNMFCAGFHEGGRDSCQGDSGGPHVTEVEGTSFLTGIISWGEECAMKGKYGIYTKVSRYVNWIKNKTKLT

SEQ ID NO: 402 - protein, 415 aa, Homo sapiens
  Factor IX R338E/T343R/E410N
YNSGKLEEFVQGNLERECMEEKCSFEEAREVFENTERTTEFWKQYVDGDQCESNPCLNGGSCKDDINSYECWCPFGFEGKNCELDVTCNIKNGRCEQFCKNSADNKVVCSCTEGYRLAENQKSCEPAVPFPCGRVSVSQTSKLTRAETVFPDVDYVNSTEAETILDNITQSTQSFNDFTRVVGGEDAKPGQFPWQVVLNGKVDAFCGGSIVNEKWIVTAAHCVETGVKITVVAGEHNIEETEHTEQKRNVIRIIPHHNYNAAINKYNHDIALLELDEPLVLNSYVTPICIADKEYTNIFLKFGSGYVSGWGRVFHKGRSALVLQYLRVPLVDRATCLESTKFRIYNNMFCAGFHEGGRDSCQGDSGGPHVTEVEGTSFLTGIISWGEECAMKGKYGIYTKVSRYVNWIKNKTKLT

SEQ ID NO: 403 - protein, 415 aa, Homo sapiens
  Factor IX Y155F/R318Y/T343R/E410N
YNSGKLEEFVQGNLERECMEEKCSFEEAREVFENTERTTEFWKQYVDGDQCESNPCLNGGSCKDDINSYECWCPFGFEGKNCELDVTCNIKNGRCEQFCKNSADNKVVCSCTEGYRLAENQKSCEPAVPFPCGRVSVSQTSKLTRAETVFPDVDFVNSTEAETILDNITQSTQSFNDFTRVVGGEDAKPGQFPWQVVLNGKVDAFCGGSIVNEKWIVTAAHCVETGVKITVVAGEHNIEETEHTEQKRNVIRIIPHHNYNAAINKYNHDIALLELDEPLVLNSYVTPICIADKEYTNIFLKFGSGYVSGWGRVFHKGYSALVLQYLRVPLVDRATCLRSTKFRIYNNMFCAGFHEGGRDSCQGDSGGPHVTEVEGTSFLTGIISWGEECAMKGKYGIYTKVSRYVNWIKNKTKLT

SEQ ID NO: 404 - protein, 415 aa, Homo sapiens
  Factor IX R318Y/T343R/E410N
YNSGKLEEFVQGNLERECMEEKCSFEEAREVFENTERTTEFWKQYVDGDQCESNPCLNGGSCKDDINSYECWCPFGFEGKNCELDVTCNIKNGRCEQFCKNSADNKVVCSCTEGYRLAENQKSCEPAVPFPCGRVSVSQTSKLTRAETVFPDVDYVNSTEAETILDNITQSTQSFNDFTRVVGGEDAKPGQFPWQVVLNGKVDAFCGGSIVNEKWIVTAAHCVETGVKITVVAGEHNIEETEHTEQKRNVIRIIPHHNYNAAINKYNHDIALLELDEPLVLNSYVTPICIADKEYTNIFLKFGSGYVSGWGRVFHKGYSALVLQYLRVPLVDRATCLRSTKFRIYNNMFCAGFHEGGRDSCQGDSGGPHVTEVEGTSFLTGIISWGEECAMKGKYGIYTKVSRYVNWIKNKTKLT

SEQ ID NO: 405 - protein, 415 aa, Homo sapiens
  Factor IX K228N/R318Y/R338E/T343R/R403E/ E410N
YNSGKLEEFVQGNLERECMEEKCSFEEAREVFENTERTTEFWKQYVDGDQCESNPCLNGGSCKDDINSYECWCPFGFEGKNCELDVTCNIKNGRCEQFCKNSADNKVVCSCTEGYRLAENQKSCEPAVPFPCGRVSVSQTSKLTRAETVFPDVDYVNSTEAETILDNITQSTQSFNDFTRVVGGEDAKPGQFPWQVVLNGKVDAFCGGSIVNEKWIVTAAHCVETGVNITVVAGEHNIEETEHTEQKRNVIRIIPHHNYNAAINKYNHDIALLELDEPLVLNSYVTPICIADKEYTNIFLKFGSGYVSGWGRVFHKGYSALVLQYLRVPLVDRATCLESTKFRIYNNMFCAGFHEGGRDSCQGDSGGPHVTEVEGTSFLTGIISWGEECAMKGKYGIYTKVSEYVNWIKNKTKLT

SEQ ID NO: 406 - protein, 415 aa, Homo sapiens
  Factor IX K228N/K247N/N249S/R318Y/R338E/ T343R/R403E
YNSGKLEEFVQGNLERECMEEKCSFEEAREVFENTERTTEFWKQYVDGDQCESNPCLNGGSCKDDINSYECWCPFGFEGKNCELDVTCNIKNGRCEQFCKNSADNKVVCSCTEGYRLAENQKSCEPAVPFPCGRVSVSQTSKLTRAETVFPDVDYVNSTEAETILDNITQSTQSFNDFTRVVGGEDAKPGQFPWQVVLNGKVDAFCGGSIVNEKWIVTAAHCVETGVNITVVAGEHNIEETEHTEQNRSVIRIIPHHNYNAAINKYNHDIALLELDEPLVLNSYVTPICIADKEYTNIFLKFGSGYVSGWGRVFHKGYSALVLQYLRVPLVDRATCLESTKFRIYNNMFCAGFHEGGRDSCQGDSGGPHVTEVEGTSFLTGIISWGEECAMKGKYGIYTKVSEYVNWIKEKTKLT

SEQ ID NO: 407 - protein, 415 aa, Homo sapiens
  Factor IX K228N/K247N/N249S/R318Y/R338E/T343R/E410N
YNSGKLEEFVQGNLERECMEEKCSFEEAREVFENTERTTEFWKQYVDGDQCESNPCLNGGSCKDDINSYECWCPFGFEGKNCELDVTCNIKNGRCEQFCKNSADNKVVCSCTEGYRLAENQKSCEPAVPFPCGRVSVSQTSKLTRAETVFPDVDYVNSTEAETILDNITQSTQSFNDFTRVVGGEDAKPGQFPWQVVLNGKVDAFCGGSIVNEKWIVTAAHCVETGVNITVVAGEHNIEETEHTEQNRSVIRIIPHHNYNAAINKYNHDIALLELDEPLVLNSYVTPICIADKEYTNIFLKFGSGYVSGWGRVFHKGYSALVLQYLRVPLVDRATCLESTKFRIYNNMFCAGFHEGGRDSCQGDSGGPHVTEVEGTSFLTGIISWGEECAMKGKYGIYTKVSRYVNWIKNKTKLT

SEQ ID NO: 408 - protein, 415 aa, Homo sapiens
  Factor IX K228N/K247N/N249S/R318Y/T343R/ R403E/E410N
YNSGKLEEFVQGNLERECMEEKCSFEEAREVFENTERTTEFWKQYVDGDQCESNPCLNGGSCKDDINSYECWCPFGFEGKNCELDVTCNIKNGRCEQFCKNSADNKVVCSCTEGYRLAENQKSCEPAVPFPCGRVSVSQTSKLTRAETVFPDVDYVNSTEAETILDNITQSTQSFNDFTRVVGGEDAKPGQFPWQVVLNGKVDAFCGGSIVNEKWIVTAAHCVETGVNITVVAGEHNIEETEHTEQNRSVIRIIPHHNYNAAINKYNHDIALLELDEPLVLNSYVTPICIADKEYTNIFLKFGSGYVSGWGRVFHKGYSALVLQYLRVPLVDRATCLRSTKFRIYNNMFCAGFHEGGRDSCQGDSGGPHVTEVEGTSFLTGIISWGEECAMKGKYGIYTKVSEYVNWIKNKTKLT

SEQ ID NO: 409 - protein, 415 aa, Homo sapiens
  Factor IX Y155F/R338E/R403E/E410N
YNSGKLEEFVQGNLERECMEEKCSFEEAREVFENTERTTEFWKQYVDGDQCESNPCLNGGSCKDDINSYECWCPFGFEGKNCELDVTCNIKNGRCEQFCKNSADNKVVCSCTEGYRLAENQKSCEPAVPFPCGRVSVSQTSKLTRAETVFPDVDFVNSTEAETILDNITQSTQSFNDFTRVVGGEDAKPGQFPWQVVLNGKVDAFCGGSIVNEKWIVTAAHCVETGVKITVVAGEHNIEETEHTEQKRNVIRIIPHHNYNAAINKYNHDIALLELDEPLVLNSYVTPICIADKEYTNIFLKFGSGYVSGWGRVFHKGRSALVLQYLRVPLVDRATCLRSTKFTIYNNMFCAGFHEGGEDSCQGDSGGPHVTEVEGTSFLTGIISWGEECAMKGKYGIYTKVSEYVNWIKNKTKLT

SEQ ID NO: 410 - protein, 415 aa, Homo sapiens
  Factor IX Y155F/R318Y/R338E/R403E
YNSGKLEEFVQGNLERECMEEKCSFEEAREVFENTERTTEFWKQYVDGDQCESNPCLNGGSCKDDINSYECWCPFGFEGKNCELDVTCNIKNGRCEQFCKNSADNKVVCSCTEGYRLAENQKSCEPAVPFPCGRVSVSQTSKLTRAETVFPDVDFVNSTEAETILDNITQSTQSFNDFTRVVGGEDAKPGQFPWQVVLNGKVDAFCGGSIVNEKWIVTAAHCVETGVKITVVAGEHNIEETEHTEQKRNVIRIIPHHNYNAAINKYNHDIALLELDEPLVLNSYVTPICIADKEYTNIFLKFGSGYVSGWGRVFHKGYSALVLQYLRVPLVDRATCLESTKFTIYNNMFCAGFHEGGRDSCQGDSGGPHVTEVEGTSFLTGIISWGEECAMKGKYGIYTKVSEYVNWIKEKTKLT

SEQ ID NO: 411 - protein, 415 aa, Homo sapiens
  Factor IX Y155F/R318Y/R403E/E410N
YNSGKLEEFVQGNLERECMEEKCSFEEAREVFENTERTTEFWKQYVDGDQCESNPCLNGGSCKDDINSYECWCPFGFEGKNCELDVTCNIKNGRCEQFCKNSADNKVVCSCTEGYRLAENQKSCEPAVPFPCGRVSVSQTSKLTRAETVFPDVDFVNSTEAETILDNITQSTQSFNDFTRVVGGEDAKPGQFPWQVVLNGKVDAFCGGSIVNEKWIVTAAHCVETGVKITVVAGEHNIEETEHTEQKRNVIRIIPHHNYNAAINKYNHDIALLELDEPLVLNSYVTPICIADKEYTNIFLKFGSGYVSGWGRVFHKGYSALVLQYLRVPLVDRATCLRSTKFTIYNNMFCAGFHEGGRDSCQGDSGGPHVTEVEGTSFLTGIISWGEECAMKGKYGIYTKVSEYVNWIKNKTKLT

SEQ ID NO: 412 - protein, 415 aa, Homo sapiens
  Factor IX Y1N
NNSGKLEEFVQGNLERECMEEKCSFEEAREVFENTERTTEFWKQYVDGDQCESNPCLNGGSCKDDINSYECWCPFGFEGKNCELDVTCNIKNGRCEQFCKNSADNKVVCSCTEGYRLAENQKSCEPAVPFPCGRVSVSQTSKLTRAETVFPDVDYVNSTEAETILDNITQSTQSFNDFTRVVGGEDAKPGQFPWQVVLNGKVDAFCGGSIVNEKWIVTAAHCVETGVKITVVAGEHNIEETEHTEQKRNVIRIIPHHNYNAAINKYNHDIALLELDEPLVLNSYVTPICIADKEYTNIFLKFGSGYVSGWGRVFHKGRSALVLQYLRVPLVDRATCLRSTKFTIYNNMFCAGFHEGGRDSCQGDSGGPHVTEVEGTSFLTGIISWGEECAMKGKYGIYTKVSRYVNWIKEKTKLT

SEQ ID NO: 413 - protein, 415 aa, Homo sapiens
  Factor IX R318F
YNSGKLEEFVQGNLERECMEEKCSFEEAREVFENTERTTEFWKQYVDGDQCESNPCLNGGSCKDDINSYECWCPFGFEGKNCELDVTCNIKNGRCEQFCKNSADNKVVCSCTEGYRLAENQKSCEPAVPFPCGRVSVSQTSKLTRAETVFPDVDYVNSTEAETILDNITQSTQSFNDFTRVVGGEDAKPGQFPWQVVLNGKVDAFCGGSIVNEKWIVTAAHCVETGVKITVVAGEHNIEETEHTEQKRNVIRIIPHHNYNAAINKYNHDIALLELDEPLVLNSYVTPICIADKEYTNIFLKFGSGYVSGWGRVFHKGFSALVLQYLRVPLVDRATCLRSTKFTIYNNMFCAGFHEGGRDSCQGDSGGPHVTEVEGTSFLTGIISWGEECAMKGKYGIYTKVSRYVNWIKEKTKLT

SEQ ID NO: 414 - protein, 415 aa, Homo sapiens
  Factor IX R318W
YNSGKLEEFVQGNLERECMEEKCSFEEAREVFENTERTTEFWKQYVDGDQCESNPCLNGGSCKDDINSYECWCPFGFEGKNCELDVTCNIKNGRCEQFCKNSADNKVVCSCTEGYRLAENQKSCEPAVPFPCGRVSVSQTSKLTRAETVFPDVDYVNSTEAETILDNITQSTQSFNDFTRVVGGEDAKPGQFPWQVVLNGKVDAFCGGSIVNEKWIVTAAHCVETGVKITVVAGEHNIEETEHTEQKRNVIRIIPHHNYNAAINKYNHDIALLELDEPLVLNSYVTPICIADKEYTNIFLKFGSGYVSGWGRVFHKGWSALVLQYLRVPLVDRATCLRSTKFTIYNNMFCAGFHEGGRDSCQGDSGGPHVTEVEGTSFLTGIISWGEECAMKGKYGIYTKVSRYVNWIKEKTKLT

SEQ ID NO: 415 - protein, 415 aa, Homo sapiens
  Factor IX Y155L
YNSGKLEEFVQGNLERECMEEKCSFEEAREVFENTERTTEFWKQYVDGDQCESNPCLNGGSCKDDINSYECWCPFGFEGKNCELDVTCNIKNGRCEQFCKNSADNKVVCSCTEGYRLAENQKSCEPAVPFPCGRVSVSQTSKLTRAETVFPDVDLVNSTEAETILDNITQSTQSFNDFTRVVGGEDAKPGQFPWQVVLNGKVDAFCGGSIVNEKWIVTAAHCVETGVKITVVAGEHNIEETEHTEQKRNVIRIIPHHNYNAAINKYNHDIALLELDEPLVLNSYVTPICIADKEYTNIFLKFGSGYVSGWGRVFHKGRSALVLQYLRVPLVDRATCLRSTKFTIYNNMFCAGFHEGGRDSCQGDSGGPHVTEVEGTSFLTGIISWGEECAMKGKYGIYTKVSRYVNWIKEKTKLT

SEQ ID NO: 416 - protein, 415 aa, Homo sapiens
  Factor IX T343D
YNSGKLEEFVQGNLERECMEEKCSFEEAREVFENTERTTEFWKQYVDGDQCESNPCLNGGSCKDDINSYECWCPFGFEGKNCELDVTCNIKNGRCEQFCKNSADNKVVCSCTEGYRLAENQKSCEPAVPFPCGRVSVSQTSKLTRAETVFPDVDYVNSTEAETILDNITQSTQSFNDFTRVVGGEDAKPGQFPWQVVLNGKVDAFCGGSIVNEKWIVTAAHCVETGVKITVVAGEHNIEETEHTEQKRNVIRIIPHHNYNAAINKYNHDIALLELDEPLVLNSYVTPICIADKEYTNIFLKFGSGYVSGWGRVFHKGRSALVLQYLRVPLVDRATCLRSTKFDIYNNMFCAGFHEGGRDSCQGDSGGPHVTEVEGTSFLTGIISWGEECAMKGKYGIYTKVSRYVNWIKEKTKLT

SEQ ID NO: 417 - protein, 415 aa, Homo sapiens
  Factor IX R403D
YNSGKLEEFVQGNLERECMEEKCSFEEAREVFENTERTTEFWKQYVDGDQCESNPCLNGGSCKDDINSYECWCPFGFEGKNCELDVTCNIKNGRCEQFCKNSADNKVVCSCTEGYRLAENQKSCEPAVPFPCGRVSVSQTSKLTRAETVFPDVDYVNSTEAETILDNITQSTQSFNDFTRVVGGEDAKPGQFPWQVVLNGKVDAFCGGSIVNEKWIVTAAHCVETGVKITVVAGEHNIEETEHTEQKRNVIRIIPHHNYNAAINKYNHDIALLELDEPLVLNSYVTPICIADKEYTNIFLKFGSGYVSGWGRVFHKGRSALVLQYLRVPLVDRATCLRSTKFTIYNNMFCAGFHEGGRDSCQGDSGGPHVTEVEGTSFLTGIISWGEECAMKGKYGIYTKVSDYVNWIKEKTKLT

SEQ ID NO: 418 - protein, 737 aa, Artificial Sequence
  Synthetic polypeptide KP1 Capsid
MAADGYLPDWLEDTLSEGIRQWWKLKPGPPPPKPAERHKDDSRGLVLPGYKYLGPGNGLDKGEPVNAADAAALEHDKAYDQQLKAGDNPYLRYNHADAEFQERLQEDTSFGGNLGRAVFQAKKRVLEPLGLVEEPVKTAPGKKRPVEHSPVEPDSSSGTGKAGQQPARKRLNFGQTGDTDSAADPQPLGEPPAAPSGLGTGTMAAGGGAPMADNNEGADGVGNASGNWHCDSTWLGDRVITTSTRTWALPTYNNHLYKQISSASTGASNDNHYFGYSTPWGYFDFNRFHCHFSPRDWQRLINNNWGFRPKRLNFKLFNIQVKEVTQNEGTKTIANNLTSTVQVFTDSEYQLPYVLGSAHQGCLPPFPADVFMIPQYGYLTLNNGSQAMGRSSFYCLEYFPSQMLRTGNNFQFTYTFEDVPFHSSYAHSQSLDRLMNPLIDQYLYYLNRTQGTTSGTTNQSRLLFSQAGPQSMSLQARNWLPGPCYRQQRLSKTANDNNNSNFPWTAASKYHLNGRDSLVNPGPAMASHKDDEEKFFPMHGNLIFGKEGTTASNAELDNVMITDEEEIRTTNPVATEQYGTVANNLQSSNTAPTTRTVNDQGALPGMVWQDRDVYLQGPIWAKIPHTDGHFHPSPLMGGFGLKHPPPQILIKNTPVPADPPTAFNKDKLNSFITQYSTGQVSVEIEWELQKENSKRWNPEIQYTSNYYKSTSVDFAVNTEGVYSEPRPIGTRYLTRNL

SEQ ID NO: 419 - protein, 737 aa, Artificial Sequence
  Synthetic polypeptide KP2 Capsid
MAADGYLPDWLEDNLSEGIREWWDLKPGAPKPKANQQKQDDGRGLVLPGYKYLGPFNGLDKGEPVNAADAAALEHDKAYDQQLKAGDNPYLRYNHADAEFQERLQEDTSFGGNLGRAVFQAKKRVLEPLGLVEEGAKTAPGKKRPVEHSPVEPDSSSGIGKTGQQPAKKRLNFGQTGDADSVPDPQPLGQPPAAPSGLGTNTMATGSGAPMADNNEGADGVGNASGNWHCDSTWLGDRVITTSTRTWALPTYNNHLYKQISSASTGASNDNHYFGYSTPWGYFDFNRFHCHFSPRDWQRLINNNWGFRPKRLNFKLFNIQVKEVTQNEGTTTIANNLTSTVQVFTDSEYQLPYVLGSAHQGCLPPFPADVFMIPQYGYLTLNNGSQAVGRSSFYCLEYFPSQMLRTGNNFTFSYTFEDVPFHSSYAHSQSLDRLMNPLIDQYLYYLNRTQGTTSGTTNQSRLLFSQAGPQSMSLQARNWLPGPCYRQQRLSKTANDNNNSNFPWTAASKYHLNGRDSLVNPGPAMASHKDDEEKFFPMHGNLIFGKEGTTASNAELDNVMITDEEEIRTTNPVATEQYGTVANNLQSSNTAPTTRTVNDQGALPGMVWQDRDVYLQGPIWAKIPHTDGHFHPSPLMGGFGLKHPPPQIMIKNTPVPANPPTTFSPAKFASFITQYSTGQVSVEIEWELQKENSKRWNPEIQYTSNYNKSVNVDFTVDTNGVYSEPRPIGTRYLTRPL

SEQ ID NO: 420 - protein, 738 aa, Artificial Sequence
  Synthetic polypeptide KP3 Capsid
MAADGYLPDWLEDTLSEGIRQWWKLKPGPPPPKPAERHKDDSRGLVLPGYKYLGPFNGLDKGEPVNEADAAALEHDKAYDQQLKAGDNPYLRYNHADAEFQERLQEDTSFGGNLGRAVFQAKKRVLEPLGLVEEGAKTAPGKKRPVEPSPQRSPDSSTGIGKKGQQPARKRLNFGQTGDSESVPDPQPLGEPPAAPSGVGPNTMAAGGGAPMADNNEGADGVGNASGNWHCDSTWLGDRVITTSTRTWALPTYNNHLYKQISSASTGASNDNHYFGYSTPWGYFDFNRFHCHFSPRDWQRLINNNWGFRPKRLNFKLFNIQVKEVTQNEGTKTIANNLTSTIQVFTDSEYQLPYVLGSAHQGCLPPFPADVFMIPQYGYLTLNNGSQAVGRSSFYCLEYFPSQMLRTGNNFQFSYTFEDVPFHSSYAHSQSLDRLMNPLIDQYLYYLNRTQGTTSGTTNQSRLLFSQAGPQSMSLQARNWLPGPCYRQQRLSKTANDNNNSNFPWTAASKYHLNGRDSLVNPGPAMASHKDDEEKFFPMHGNLIFGKEGTTASNAELDNVMITDEEEIRTTNPVATEQYGTVANNLQSSNTAPTTRTVNDQGALPGMVWQDRDVYLQGPIWAKIPHTDGNFHPSPLMGGFGLKHPPPQILIKNTPVPADPPTTFNQSKLNSFITQYSTGQVSVEIEWELQKENSKRWNPEIQYTSNYYKSTSVDFAVNTEGVYSEPRPIGTRYLTRNL

SEQ ID NO: 421 - DNA, 2214 bp, Artificial Sequence
  KP1 Capsid
atggctgccgatggttatcttccagattggctcgaggacactctctctgaaggaataagacagtggtggaagctcaaacctggcccaccaccaccaaagcccgcagagcggcataaggacgacagcaggggtcttgtgcttccgggttacaaatacctcggacccggcaacggactcgacaagggggagcccgtcaacgcggcggacgcagcggccctcgagcacgacaaggcctacgaccagcagctcaaagcgggtgacaatccgtacctgcggtataaccacgccgacgccgagtttcaggagcgtctgcaagaagatacgtcttttgggggcaacctcgggcgagcagtcttccaggccaagaagcgggttctcgaacctctcggtctggttgaggaacctgttaagacggctccgggaaaaaagaggccggtagagcactctcctgtggagccagactcctcctcgggaaccggaaaggcgggccagcagcctgcgaggaagcgactcaactttggtcagactggagacaccgactccgccgctgacccccagcctctcggagaaccaccagcagccccctctggtctgggaactggtacaatggctgcaggcggtggcgctccaatggcagacaataacgaaggcgccgacggagtgggtaatgcctcgggaaattggcattgcgattccacatggctgggcgacagagtcatcaccaccagcacccgcacctgggccttgcccacctacaataaccacctctacaagcaaatctccagtgcttcaacgggggccagcaacgacaaccactacttcggctacagcaccccctgggggtactttgacttcaaccgcttccactgccacttctcaccacgtgactggcaaagactcatcaacaacaactggggattccggcccaagagactcaacttcaagctcttcaacatccaggtcaaggaggtcacgcagaatgaaggcaccaagaccatcgccaataaccttaccagcacggttcaggtgtttactgactcggagtaccagctgccgtacgttctcggctctgcccaccagggctgcctgcctccgttcccggcggacgtgttcatgattccgcagtacggctacctaacgctcaacaatggcagccaggcgatgggtcgctcgtccttctactgcctggagtactttccgtcgcagatgctgagaaccggcaacaacttccagtttacttacaccttcgaggacgtgcctttccacagcagctacgctcacagccagagtttggatcgcttgatgaatcctcttattgatcagtatctgtactacctgaacagaacgcaaggaacaacctctggaacaaccaaccaatcacggctgctttttagccaggctgggcctcagtctatgtctttgcaggccagaaattggctacctgggccctgctaccggcaacagagactttcaaagactgctaacgacaacaacaacagtaactttccttggacagcggccagcaaatatcatctcaatggccgcgactcgctggtgaatccaggaccagctatggccagtcacaaggacgatgaagaaaaatttttccctatgcacggcaatctaatatttggcaaagaagggacaacggcaagtaacgcagaattagataatgtaatgattacggatgaagaagagattcgtaccaccaatcctgtggcaacagagcagtatggaactgtggcaaataacttgcagagctcaaatacagctcccacgactagaactgtcaatgatcagggggccttacctggcatggtgtggcaagatcgtgacgtgtaccttcaaggacctatctgggcaaagattcctcacacggatggacactttcatccttctcctctgatgggcggctttggcctgaaacatcctccgcctcagatcctgatcaagaacacgcctgtacctgcggatcctccaacggccttcaacaaggacaagctgaactctttcatcacccagtattctactggccaagtcagcgtggagatcgagtgggagctgcagaaggaaaacagcaagcgctggaaccccgagatccagtacacctccaactactacaaatctacaagtgtggactttgctgttaatacagaaggcgtgtactctgaaccccgccccattggcacccgttacctcacccgtaatctgtaa

SEQ ID NO: 422 - DNA, 2214 bp, Artificial Sequence
  KP2 Capsid
atggctgccgatggttatcttccagattggctcgaggacaacctctctgagggcattcgcgagtggtgggacttgaaacctggagccccgaaacccaaagccaaccagcaaaagcaggacgacggccggggtctggtgcttcctggctacaagtacctcggacccttcaacggactcgacaagggggagcccgtcaacgcggcggatgcagcggccctcgagcacgacaaggcctacgaccagcagctcaaagcgggtgacaatccgtaccttcggtataaccacgccgacgccgagtttcaggagcgtctgcaagaagatacgtcttttgggggcaacctcgggcgagcagtcttccaggccaagaagcgggttctcgaacctctcggtctggttgaggaaggtgctaagacggctcctggaaagaaacgtccggtagagcactctcctgtggagccagactcctcctcgggcatcggcaagacaggccagcagcccgctaaaaagagactcaattttggtcagactggcgacgcagactcagtacctgacccccagcctctcggacagccaccagcagccccctctggtctgggaactaatacgatggctacaggcagtggcgcaccaatggcagacaataacgagggcgccgacggagtgggtaatgcctcaggaaattggcattgcgattccacatggctgggcgacagagtcatcaccaccagcacccgaacatgggccttgcccacctataacaaccacctctacaagcaaatctccagtgcttcaacgggggccagcaacgacaaccactacttcggctacagcaccccctgggggtactttgacttcaaccgcttccactgccacttctccccgcgagactggcagcggctcatcaacaacaactgggggttccggcccaagcgactcaacttcaagctcttcaacatccaggtcaaggaggtcacgcagaatgaaggcacgacgactattgccaataaccttaccagcacggttcaagtgtttacggactcggagtatcagctcccgtacgtgctcggctctgcccaccagggctgcctgcctccgttcccggcggacgtgttcatgattccccagtacggctacctaacactcaacaacggtagtcaggccgtgggacgctcctccttctactgcctggaatactttccttctcagatgctgcgtaccggaaacaactttaccttcagctacacttttgaggacgttcctttccacagcagctacgctcacagccagagtttggatcgcttgatgaatcctcttattgatcagtatctgtactacctgaacagaacgcaaggaacaacctctggaacaaccaaccaatcacggctgctttttagccaggctgggcctcagtctatgtctttgcaggccagaaattggctacctgggccctgctaccggcaacagagactttcaaagactgctaacgacaacaacaacagtaactttccttggacagcggccagcaaatatcatctcaatggccgcgactcgctggtgaatccaggaccagctatggccagtcacaaggacgatgaagaaaaatttttccctatgcacggcaatctaatatttggcaaagaagggacaacggcaagtaacgcagaattagataatgtaatgattacggatgaagaagagattcgtaccaccaatcctgtggcaacagagcagtatggaactgtggcaaataacttgcagagctcaaatacagctcccacgactagaactgtcaatgatcagggggccttacctggcatggtgtggcaagatcgtgacgtgtaccttcaaggacctatctgggcaaagattcctcacacggatggacactttcatccttctcctctgatgggaggctttggactgaaacatccgcctcctcaaatcatgatcaaaaatactccggtaccggcaaatcctccgacgactttcagcccggccaagtttgcttcatttatcactcagtactccactggacaggtcagcgtggaaattgagtgggagctacagaaagaaaacagcaaacgttggaatccagagattcagtacacttccaactacaacaagtctgttaatgtggactttactgtagacactaatggtgtttatagtgagcctcgccccattggcacccgttacctcacccgtcccctgtaa

SEQ ID NO: 423 - DNA, 2217 bp, Artificial Sequence
  KP3 Capsid
atggctgccgatggttatcttccagattggctcgaggacactctctctgaaggaataagacagtggtggaagctcaaacctggcccaccaccaccaaagcccgcagagcggcataaggacgacagcaggggtcttgtgcttcctgggtacaagtacctcggacccttcaacggactcgacaaaggagagccggtcaacgaggcggatgcagcggccctcgagcacgacaaggcctacgaccagcagctcaaagcgggtgacaatccgtaccttcggtataaccacgccgacgccgagtttcaggagcgtctgcaagaagatacgtcttttgggggcaacctcgggcgagcagtcttccaggccaagaagcgggttctcgaacctctcggtctggttgaggaaggcgctaagacggctcctggaaagaagagaccggtagagccatcaccccagcgttctccagactcctctacgggcatcggcaagaaaggccaacagcccgccagaaaaagactcaattttggtcagactggcgactcagagtcagttccagaccctcaacctctcggagaacctccagcagcgccctctggtgtgggacctaatacaatggctgcaggcggtggcgcaccaatggcagacaataacgaaggcgccgacggagtgggtaatgcctcaggaaattggcattgcgattccacatggctgggcgacagagtcatcaccaccagcacccgcacctgggccttgcccacctacaataaccacctctacaagcaaatctccagtgcttcaacgggggccagcaacgacaaccactacttcggctacagcaccccttgggggtattttgacttcaacagattccactgccacttttcaccacgtgactggcaaagactcatcaacaacaactggggattccgacccaagagactcaacttcaagctctttaacattcaagtcaaagaggtcacgcagaatgaaggcaccaagaccatcgccaataacctcaccagcaccatccaggtgtttacggactcggagtaccagctgccgtacgttctcggctctgcccaccagggctgcctgcctccgttcccggcggacgtgttcatgattccccagtacggctacctaacactcaacaacggtagtcaggccgtgggacgctcctccttttactgcctggagtacttcccttcgcagatgctaaggactggaaataacttccaattcagctataccttcgaggatgtaccttttcacagcagctacgctcacagccagagtttggatcgcttgatgaatcctcttattgatcagtatctgtactacctgaacagaacgcaaggaacaacctctggaacaaccaaccaatcacggctgctttttagccaggctgggcctcagtctatgtctttgcaggccagaaattggctacctgggccctgctaccggcaacagagactttcaaagactgctaacgacaacaacaacagtaactttccttggacagcggccagcaaatatcatctcaatggccgcgactcgctggtgaatccaggaccagctatggccagtcacaaggacgatgaagaaaaatttttccctatgcacggcaatctaatatttggcaaagaagggacaacggcaagtaacgcagaattagataatgtaatgattacggatgaagaagagattcgtaccaccaatcctgtggcaacagagcagtatggaactgtggcaaataacttgcagagctcaaatacagctcccacgactagaactgtcaatgatcagggggccttacctggcatggtgtggcaagatagagacgtgtacctgcagggtcctatctgggccaagattcctcacacggacggaaactttcatccctcgccgctgatgggaggctttggactgaaacacccgcctcctcagatcctgatcaagaacacgcctgtacctgcggatcctccgaccaccttcaaccagtcaaagctgaactctttcatcacgcaatacagcaccggacaggtcagcgtggaaattgaatgggagctgcagaaggaaaacagcaagcgctggaaccccgagatccagtacacctccaactactacaaatctacaagtgtggactttgctgttaatacagaaggcgtgtactctgaaccccgccccattggcacccgttacctcacccgtaatctgtaa

SEQ ID NO: 424 - DNA, 2214 bp, Artificial Sequence
  AAV-DJ Capsid
atggctgccgatggttatcttccagattggctcgaggacactctctctgaaggaataagacagtggtggaagctcaaacctggcccaccaccaccaaagcccgcagagcggcataaggacgacagcaggggtcttgtgcttcctgggtacaagtacctcggacccttcaacggactcgacaagggagagccggtcaacgaggcagacgccgcggccctcgagcacgacaaagcctacgaccggcagctcgacagcggagacaacccgtacctcaagtacaaccacgccgacgccgagttccaggagcggctcaaagaagatacgtcttttgggggcaacctcgggcgagcagtcttccaggccaaaaagaggcttcttgaacctcttggtctggttgaggaagcggctaagacggctcctggaaagaagaggcctgtagagcactctcctgtggagccagactcctcctcgggaaccggaaaggcgggccagcagcctgcaagaaaaagattgaattttggtcagactggagacgcagactcagtcccagaccctcaaccaatcggagaacctcccgcagccccctcaggtgtgggatctcttacaatggctgcaggcggtggcgcaccaatggcagacaataacgagggcgccgacggagtgggtaattcctcgggaaattggcattgcgattccacatggatgggcgacagagtcatcaccaccagcacccgaacctgggccctgcccacctacaacaaccacctctacaagcaaatctccaacagcacatctggaggatcttcaaatgacaacgcctacttcggctacagcaccccctgggggtattttgactttaacagattccactgccacttttcaccacgtgactggcagcgactcatcaacaacaactggggattccggcccaagagactcagcttcaagctcttcaacatccaggtcaaggaggtcacgcagaatgaaggcaccaagaccatcgccaataacctcaccagcaccatccaggtgtttacggactcggagtaccagctgccgtacgttctcggctctgcccaccagggctgcctgcctccgttcccggcggacgtgttcatgattccccagtacggctacctaacactcaacaacggtagtcaggccgtgggacgctcctccttctactgcctggaatactttccttcgcagatgctgagaaccggcaacaacttccagtttacttacaccttcgaggacgtgcctttccacagcagctacgcccacagccagagcttggaccggctgatgaatcctctgattgaccagtacctgtactacttgtctcggactcaaacaacaggaggcacgacaaatacgcagactctgggcttcagccaaggtgggcctaatacaatggccaatcaggcaaagaactggctgccaggaccctgttaccgccagcagcgagtatcaaagacatctgcggataacaacaacagtgaatactcgtggactggagctaccaagtaccacctcaatggcagagactctctggtgaatccgggcccggccatggcaagccacaaggacgatgaagaaaagttttttcctcagagcggggttctcatctttgggaagcaaggctcagagaaaacaaatgtggacattgaaaaggtcatgattacagacgaagaggaaatcaggacaaccaatcccgtggctacggagcagtatggttctgtatctaccaacctccagagaggcaacagacaagcagctaccgcagatgtcaacacacaaggcgttcttccaggcatggtctggcaggacagagatgtgtaccttcaggggcccatctgggcaaagattccacacacggacggacattttcacccctctcccctcatgggtggattcggacttaaacaccctccgcctcagatcctgatcaagaacacgcctgtacctgcggatcctccgaccaccttcaaccagtcaaagctgaactctttcatcacccagtattctactggccaagtcagcgtggagatcgagtgggagctgcagaaggaaaacagcaagcgctggaaccccgagatccagtacacctccaactactacaaatctacaagtgtggactttgctgttaatacagaaggcgtgtactctgaaccccgccccattggcacccgttacctcacccgtaatctgtaa

SEQ ID NO: 425 - protein, 737 aa, Artificial Sequence
  AAV-DJ Capsid
MAADGYLPDWLEDTLSEGIRQWWKLKPGPPPPKPAERHKDDSRGLVLPGYKYLGPFNGLDKGEPVNEADAAALEHDKAYDRQLDSGDNPYLKYNHADAEFQERLKEDTSFGGNLGRAVFQAKKRLLEPLGLVEEAAKTAPGKKRPVEHSPVEPDSSSGTGKAGQQPARKRLNFGQTGDADSVPDPQPIGEPPAAPSGVGSLTMAAGGGAPMADNNEGADGVGNSSGNWHCDSTWMGDRVITTSTRTWALPTYNNHLYKQISNSTSGGSSNDNAYFGYSTPWGYFDFNRFHCHFSPRDWQRLINNNWGFRPKRLSFKLFNIQVKEVTQNEGTKTIANNLTSTIQVFTDSEYQLPYVLGSAHQGCLPPFPADVFMIPQYGYLTLNNGSQAVGRSSFYCLEYFPSQMLRTGNNFQFTYTFEDVPFHSSYAHSQSLDRLMNPLIDQYLYYLSRTQTTGGTTNTQTLGFSQGGPNTMANQAKNWLPGPCYRQQRVSKTSADNNNSEYSWTGATKYHLNGRDSLVNPGPAMASHKDDEEKFFPQSGVLIFGKQGSEKTNVDIEKVMITDEEEIRTTNPVATEQYGSVSTNLQRGNRQAATADVNTQGVLPGMVWQDRDVYLQGPIWAKIPHTDGHFHPSPLMGGFGLKHPPPQILIKNTPVPADPPTTFNQSKLNSFITQYSTGQVSVEIEWELQKENSKRWNPEIQYTSNYYKSTSVDFAVNTEGVYSEPRPIGTRYLTRNL

SEQ ID NO: 426 - DNA, 2214 bp, Artificial Sequence
  AAV-DJ-8 Capsid
atggctgccgatggttatcttccagattggctcgaggacactctctctgaaggaataagacagtggtggaagctcaaacctggcccaccaccaccaaagcccgcagagcggcataaggacgacagcaggggtcttgtgcttcctgggtacaagtacctcggacccttcaacggactcgacaagggagagccggtcaacgaggcagacgccgcggccctcgagcacgacaaagcctacgaccggcagctcgacagcggagacaacccgtacctcaagtacaaccacgccgacgccgagttccaggagcggctcaaagaagatacgtcttttgggggcaacctcgggcgagcagtcttccaggccaaaaagaggcttcttgaacctcttggtctggttgaggaagcggctaagacggctcctggaaagaagaggcctgtagagcactctcctgtggagccagactcctcctcgggaaccggaaaggcgggccagcagcctgcaagaaaaagattgaattttggtcagactggagacgcagactcagtcccagaccctcaaccaatcggagaacctcccgcagccccctcaggtgtgggatctcttacaatggctgcaggcggtggcgcaccaatggcagacaataacgagggcgccgacggagtgggtaattcctcgggaaattggcattgcgattccacatggatgggcgacagagtcatcaccaccagcacccgaacctgggccctgcccacctacaacaaccacctctacaagcaaatctccaacagcacatctggaggatcttcaaatgacaacgcctacttcggctacagcaccccctgggggtattttgactttaacagattccactgccacttttcaccacgtgactggcagcgactcatcaacaacaactggggattccggcccaagagactcagcttcaagctcttcaacatccaggtcaaggaggtcacgcagaatgaaggcaccaagaccatcgccaataacctcaccagcaccatccaggtgtttacggactcggagtaccagctgccgtacgttctcggctctgcccaccagggctgcctgcctccgttcccggcggacgtgttcatgattccccagtacggctacctaacactcaacaacggtagtcaggccgtgggacgctcctccttctactgcctggaatactttccttcgcagatgctgagaaccggcaacaacttccagtttacttacaccttcgaggacgtgcctttccacagcagctacgcccacagccagagcttggaccggctgatgaatcctctgattgaccagtacctgtactacttgtctcggactcaaacaacaggaggcacgacaaatacgcagactctgggcttcagccaaggtgggcctaatacaatggccaatcaggcaaagaactggctgccaggaccctgttaccgccagcagcgagtatcaaagacatctgcggataacaacaacagtgaatactcgtggactggagctaccaagtaccacctcaatggcagagactctctggtgaatccgggcccggccatggcaagccacaaggacgatgaagaaaagttttttcctcagagcggggttctcatctttgggaagcaaggctcagagaaaacaaatgtggacattgaaaaggtcatgattacagacgaagaggaaatcaggacaaccaatcccgtggctacggagcagtatggttctgtatctaccaacctccagcaaggcaacacacaagcagctaccgcagatgtcaacacacaaggcgttcttccaggcatggtctggcaggacagagatgtgtaccttcaggggcccatctgggcaaagattccacacacggacggacattttcacccctctcccctcatgggtggattcggacttaaacaccctccgcctcagatcctgatcaagaacacgcctgtacctgcggatcctccgaccaccttcaaccagtcaaagctgaactctttcatcacccagtattctactggccaagtcagcgtggagatcgagtgggagctgcagaaggaaaacagcaagcgctggaaccccgagatccagtacacctccaactactacaaatctacaagtgtggactttgctgttaatacagaaggcgtgtactctgaaccccgccccattggcacccgttacctcacccgtaatctgtaa

SEQ ID NO: 427 - protein, 737 aa, Artificial Sequence
  AAV-DJ-8 Capsid
MAADGYLPDWLEDTLSEGIRQWWKLKPGPPPPKPAERHKDDSRGLVLPGYKYLGPFNGLDKGEPVNEADAAALEHDKAYDRQLDSGDNPYLKYNHADAEFQERLKEDTSFGGNLGRAVFQAKKRLLEPLGLVEEAAKTAPGKKRPVEHSPVEPDSSSGTGKAGQQPARKRLNFGQTGDADSVPDPQPIGEPPAAPSGVGSLTMAAGGGAPMADNNEGADGVGNSSGNWHCDSTWMGDRVITTSTRTWALPTYNNHLYKQISNSTSGGSSNDNAYFGYSTPWGYFDFNRFHCHFSPRDWQRLINNNWGFRPKRLSFKLFNIQVKEVTQNEGTKTIANNLTSTIQVFTDSEYQLPYVLGSAHQGCLPPFPADVFMIPQYGYLTLNNGSQAVGRSSFYCLEYFPSQMLRTGNNFQFTYTFEDVPFHSSYAHSQSLDRLMNPLIDQYLYYLSRTQTTGGTTNTQTLGFSQGGPNTMANQAKNWLPGPCYRQQRVSKTSADNNNSEYSWTGATKYHLNGRDSLVNPGPAMASHKDDEEKFFPQSGVLIFGKQGSEKTNVDIEKVMITDEEEIRTTNPVATEQYGSVSTNLQQGNTQAATADVNTQGVLPGMVWQDRDVYLQGPIWAKIPHTDGHFHPSPLMGGFGLKHPPPQILIKNTPVPADPPTTFNQSKLNSFITQYSTGQVSVEIEWELQKENSKRWNPEIQYTSNYYKSTSVDFAVNTEGVYSEPRPIGTRYLTRNL

SEQ ID NO: 428 - DNA, 2211 bp, Artificial Sequence
  AAV-LK03 Capsid
atggctgctgacggttatcttccagattggctcgaggacaacctttctgaaggcattcgagagtggtgggcgctgcaacctggagcccctaaacccaaggcaaatcaacaacatcaggacaacgctcggggtcttgtgcttccgggttacaaatacctcggacccggcaacggactcgacaagggggaacccgtcaacgcagcggacgcggcagccctcgagcacgacaaggcctacgaccagcagctcaaggccggtgacaacccctacctcaagtacaaccacgccgacgccgagttccaggagcggctcaaagaagatacgtcttttgggggcaacctcgggcgagcagtcttccaggccaaaaagaggcttcttgaacctcttggtctggttgaggaagcggctaagacggctcctggaaagaagaggcctgtagatcagtctcctcaggaaccggactcatcatctggtgttggcaaatcgggcaaacagcctgccagaaaaagactaaatttcggtcagactggcgactcagagtcagtcccagaccctcaacctctcggagaaccaccagcagcccccacaagtttgggatctaatacaatggcttcaggcggtggcgcaccaatggcagacaataacgagggtgccgatggagtgggtaattcctcaggaaattggcattgcgattcccaatggctgggcgacagagtcatcaccaccagcaccagaacctgggccctgcccacttacaacaaccatctctacaagcaaatctccagccaatcaggagcttcaaacgacaaccactactttggctacagcaccccttgggggtattttgactttaacagattccactgccacttctcaccacgtgactggcagcgactcattaacaacaactggggattccggcccaagaaactcagcttcaagctcttcaacatccaagttaaagaggtcacgcagaacgatggcacgacgactattgccaataaccttaccagcacggttcaagtgtttacggactcggagtatcagctcccgtacgtgctcgggtcggcgcaccaaggctgtctcccgccgtttccagcggacgtcttcatggtccctcagtatggatacctcaccctgaacaacggaagtcaagcggtgggacgctcatccttttactgcctggagtacttcccttcgcagatgctaaggactggaaataacttccaattcagctataccttcgaggatgtaccttttcacagcagctacgctcacagccagagtttggatcgcttgatgaatcctcttattgatcagtatctgtactacctgaacagaacgcaaggaacaacctctggaacaaccaaccaatcacggctgctttttagccaggctgggcctcagtctatgtctttgcaggccagaaattggctacctgggccctgctaccggcaacagagactttcaaagactgctaacgacaacaacaacagtaactttccttggacagcggccagcaaatatcatctcaatggccgcgactcgctggtgaatccaggaccagctatggccagtcacaaggacgatgaagaaaaatttttccctatgcacggcaatctaatatttggcaaagaagggacaacggcaagtaacgcagaattagataatgtaatgattacggatgaagaagagattcgtaccaccaatcctgtggcaacagagcagtatggaactgtggcaaataacttgcagagctcaaatacagctcccacgactagaactgtcaatgatcagggggccttacctggcatggtgtggcaagatcgtgacgtgtaccttcaaggacctatctgggcaaagattcctcacacggatggacactttcatccttctcctctgatgggaggctttggactgaaacatccgcctcctcaaatcatgatcaaaaatactccggtaccggcaaatcctccgacgactttcagcccggccaagtttgcttcatttatcactcagtactccactggacaggtcagcgtggaaattgagtgggagctacagaaagaaaacagcaaacgttggaatccagagattcagtacacttccaactacaacaagtctgttaatgtggactttactgtagacactaatggtgtttatagtgaacctcgccccattggcacccgttaccttacccgtcccctgtaa

SEQ ID NO: 429 - protein, 736 aa, Artificial Sequence
  AAV-LK03 Capsid
MAADGYLPDWLEDNLSEGIREWWALQPGAPKPKANQQHQDNARGLVLPGYKYLGPGNGLDKGEPVNAADAAALEHDKAYDQQLKAGDNPYLKYNHADAEFQERLKEDTSFGGNLGRAVFQAKKRLLEPLGLVEEAAKTAPGKKRPVDQSPQEPDSSSGVGKSGKQPARKRLNFGQTGDSESVPDPQPLGEPPAAPTSLGSNTMASGGGAPMADNNEGADGVGNSSGNWHCDSQWLGDRVITTSTRTWALPTYNNHLYKQISSQSGASNDNHYFGYSTPWGYFDFNRFHCHFSPRDWQRLINNNWGFRPKKLSFKLFNIQVKEVTQNDGTTTIANNLTSTVQVFTDSEYQLPYVLGSAHQGCLPPFPADVFMVPQYGYLTLNNGSQAVGRSSFYCLEYFPSQMLRTGNNFQFSYTFEDVPFHSSYAHSQSLDRLMNPLIDQYLYYLNRTQGTTSGTTNQSRLLFSQAGPQSMSLQARNWLPGPCYRQQRLSKTANDNNNSNFPWTAASKYHLNGRDSLVNPGPAMASHKDDEEKFFPMHGNLIFGKEGTTASNAELDNVMITDEEEIRTTNPVATEQYGTVANNLQSSNTAPTTRTVNDQGALPGMVWQDRDVYLQGPIWAKIPHTDGHFHPSPLMGGFGLKHPPPQIMIKNTPVPANPPTTFSPAKFASFITQYSTGQVSVEIEWELQKENSKRWNPEIQYTSNYNKSVNVDFTVDTNGVYSEPRPIGTRYLTRPL

SEQ ID NO: 430 - DNA, 7333 bp, Artificial Sequence
  KP1 Vector
  misc_feature (6)...(1871): rep
  misc_feature (1888)...(4101): KP1 capsid
ccgccatgccggggttttacgagattgtgattaaggtccccagcgaccttgacgagcatctgcccggcatttctgacagctttgtgaactgggtggccgagaaggaatgggagttgccgccagattctgacatggatctgaatctgattgagcaggcacccctgaccgtggccgagaagctgcagcgcgactttctgacggaatggcgccgtgtgagtaaggccccggaggctcttttctttgtgcaatttgagaagggagagagctacttccacatgcacgtgctcgtggaaaccaccggggtgaaatccatggttttgggacgtttcctgagtcagattcgcgaaaaactgattcagagaatttaccgcgggatcgagccgactttgccaaactggttcgcggtcacaaagaccagaaatggcgccggaggcgggaacaaggtggtggatgagtgctacatccccaattacttgctccccaaaacccagcctgagctccagtgggcgtggactaatatggaacagtatttaagcgcctgtttgaatctcacggagcgtaaacggttggtggcgcagcatctgacgcacgtgtcgcagacgcaggagcagaacaaagagaatcagaatcccaattctgatgcgccggtgatcagatcaaaaacttcagccaggtacatggagctggtcgggtggctcgtggacaaggggattacctcggagaagcagtggatccaggaggaccaggcctcatacatctccttcaatgcggcctccaactcgcggtcccaaatcaaggctgccttggacaatgcgggaaagattatgagcctgactaaaaccgcccccgactacctggtgggccagcagcccgtggaggacatttccagcaatcggatttataaaattttggaactaaacgggtacgatccccaatatgcggcttccgtctttctgggatgggccacgaaaaagttcggcaagaggaacaccatctggctgtttgggcctgcaactaccgggaagaccaacatcgcggaggccatagcccacactgtgcccttctacgggtgcgtaaactggaccaatgagaactttcccttcaacgactgtgtcgacaagatggtgatctggtgggaggaggggaagatgaccgccaaggtcgtggagtcggccaaagccattctcggaggaagcaaggtgcgcgtggaccagaaatgcaagtcctcggcccagatagacccgactcccgtgatcgtcacctccaacaccaacatgtgcgccgtgattgacgggaactcaacgaccttcgaacaccagcagccgttgcaagaccggatgttcaaatttgaactcacccgccgtctggatcatgactttgggaaggtcaccaagcaggaagtcaaagactttttccggtgggcaaaggatcacgtggttgaggtggagcatgaattctacgtcaaaaagggtggagccaagaaaagacccgcccccagtgacgcagatataagtgagcccaaacgggtgcgcgagtcagttgcgcagccatcgacgtcagacgcggaagcttcgatcaactacgcagacaggtaccaaaacaaatgttctcgtcacgtgggcatgaatctgatgctgtttccctgcagacaatgcgagagaatgaatcagaattcaaatatctgcttcactcacggacagaaagactgtttagagtgctttcccgtgtcagaatctcaacccgtttctgtcgtcaaaaaggcgtatcagaaactgtgctacattcatcatatcatgggaaaggtgccagacgcttgcactgcctgcgatctggtcaatgtggatttggatgactgcatctttgaacaataaatgatttaaatcaggtatggctgccgatggttatcttccagattggctcgaggacactctctctgaaggaataagacagtggtggaagctcaaacctggcccaccaccaccaaagcccgcagagcggcataaggacgacagcaggggtcttgtgcttccgggttacaaatacctcggacccggcaacggactcgacaagggggagcccgtcaacgcggcggacgcagcggccctcgagcacgacaaggcctacgaccagcagctcaaagcgggtgacaatccgtacctgcggtataaccacgccgacgccgagtttcaggagcgtctgcaagaagatacgtcttttgggggcaacctcgggcgagcagtcttccaggccaagaagcgggttctcgaacctctcggtctggttgaggaacctgttaagacggctccgggaaaaaagaggccggtagagcactctcctgtggagccagactcctcctcgggaaccggaaaggcgggccagcagcctgcgaggaagcgactcaactttggtcagactggagacaccgactccgccgctgacccccagcctctcggagaaccaccagcagccccctctggtctgggaactggtacaatggctgcaggcggtggcgctccaatggcagacaataacgaaggcgccgacggagtgggtaatgcctcgggaaattggcattgcgattccacatggctgggcgacagagtcatcaccaccagcacccgcacctgggccttgcccacctacaataaccacctctacaagcaaatctccagtgcttcaacgggggccagcaacgacaaccactacttcggctacagcaccccctgggggtactttgacttcaaccgcttccactgccacttctcaccacgtgactggcaaagactcatcaacaacaactggggattccggcccaagagactcaacttcaagctcttcaacatccaggtcaaggaggtcacgcagaatgaaggcaccaagaccatcgccaataaccttaccagcacggttcaggtgtttactgactcggagtaccagctgccgtacgttctcggctctgcccaccagggctgcctgcctccgttcccggcggacgtgttcatgattccgcagtacggctacctaacgctcaacaatggcagccaggcgatgggtcgctcgtccttctactgcctggagtactttccgtcgcagatgctgagaaccggcaacaacttccagtttacttacaccttcgaggacgtgcctttccacagcagctacgctcacagccagagtttggatcgcttgatgaatcctcttattgatcagtatctgtactacctgaacagaacgcaaggaacaacctctggaacaaccaaccaatcacggctgctttttagccaggctgggcctcagtctatgtctttgcaggccagaaattggctacctgggccctgctaccggcaacagagactttcaaagactgctaacgacaacaacaacagtaactttccttggacagcggccagcaaatatcatctcaatggccgcgactcgctggtgaatccaggaccagctatggccagtcacaaggacgatgaagaaaaatttttccctatgcacggcaatctaatatttggcaaagaagggacaacggcaagtaacgcagaattagataatgtaatgattacggatgaagaagagattcgtaccaccaatcctgtggcaacagagcagtatggaactgtggcaaataacttgcagagctcaaatacagctcccacgactagaactgtcaatgatcagggggccttacctggcatggtgtggcaagatcgtgacgtgtaccttcaaggacctatctgggcaaagattcctcacacggatggacactttcatccttctcctctgatgggcggctttggcctgaaacatcctccgcctcagatcctgatcaagaacacgcctgtacctgcggatcctccaacggccttcaacaaggacaagctgaactctttcatcacccagtattctactggccaagtcagcgtggagatcgagtgggagctgcagaaggaaaacagcaagcgctggaaccccgagatccagtacacctccaactactacaaatctacaagtgtggactttgctgttaatacagaaggcgtgtactctgaaccccgccccattggcacccgttacctcacccgtaatctgtaattgcctgttaatcaataaaccggttgattcgtttcagttgaactttggtctctgcgaagggcgaattcgtttaaacctgcaggactagaggtcctgtattagaggtcacgtgagtgttttgcgacattttgcgacaccatgtggtcacgctgggtatttaagcccgagtgagcacgcagggtctccattttgaagcgggaggtttgaacgcgcagccgccaagccgaattctgcagatatccatcacactggcggccgctcgactagagcggccgccaccgcggtggagctccagcttttgttccctttagtgagggttaattgcgcgcttggcgtaatcatggtcatagctgtttcctgtgtgaaattgttatccgctcacaattccacacaacatacgagccggaagcataaagtgtaaagcctggggtgcctaatgagtgagctaactcacattaattgcgttgcgctcactgcccgctttccagtcgggaaacctgtcgtgccagctgcattaatgaatcggccaacgcgcggggagaggcggtttgcgtattgggcgctcttccgcttcctcgctcactgactcgctgcgctcggtcgttcggctgcggcgagcggtatcagctcactcaaaggcggtaatacggttatccacagaatcaggggataacgcaggaaagaacatgtgagcaaaaggccagcaaaaggccaggaaccgtaaaaaggccgcgttgctggcgtttttccataggctccgcccccctgacgagcatcacaaaaatcgacgctcaagtcagaggtggcgaaacccgacaggactataaagataccaggcgtttccccctggaagctccctcgtgcgctctcctgttccgaccctgccgcttaccggatacctgtccgcctttctcccttcgggaagcgtggcgctttctcatagctcacgctgtaggtatctcagttcggtgtaggtcgttcgctccaagctgggctgtgtgcacgaaccccccgttcagcccgaccgctgcgccttatccggtaactatcgtcttgagtccaacccggtaagacacgacttatcgccactggcagcagccactggtaacaggattagcagagcgaggtatgtaggcggtgctacagagttcttgaagtggtggcctaactacggctacactagaagaacagtatttggtatctgcgctctgctgaagccagttaccttcggaaaaagagttggtagctcttgatccggcaaacaaaccaccgctggtagcggtggtttttttgtttgcaagcagcagattacgcgcagaaaaaaaggatctcaagaagatcctttgatcttttctacggggtctgacgctcagtggaacgaaaactcacgttaagggattttggtcatgagattatcaaaaaggatcttcacctagatccttttaaattaaaaatgaagttttaaatcaatctaaagtatatatgagtaaacttggtctgacagttaccaatgcttaatcagtgaggcacctatctcagcgatctgtctatttcgttcatccatagttgcctgactccccgtcgtgtagataactacgatacgggagggcttaccatctggccccagtgctgcaatgataccgcgagacccacgctcaccggctccagatttatcagcaataaaccagccagccggaagggccgagcgcagaagtggtcctgcaactttatccgcctccatccagtctattaattgttgccgggaagctagagtaagtagttcgccagttaatagtttgcgcaacgttgttgccattgctacaggcatcgtggtgtcacgctcgtcgtttggtatggcttcattcagctccggttcccaacgatcaaggcgagttacatgatcccccatgttgtgcaaaaaagcggttagctccttcggtcctccgatcgttgtcagaagtaagttggccgcagtgttatcactcatggttatggcagcactgcataattctcttactgtcatgccatccgtaagatgcttttctgtgactggtgagtactcaaccaagtcattctgagaatagtgtatgcggcgaccgagttgctcttgcccggcgtcaatacgggataataccgcgccacatagcagaactttaaaagtgctcatcattggaaaacgttcttcggggcgaaaactctcaaggatcttaccgctgttgagatccagttcgatgtaacccactcgtgcacccaactgatcttcagcatcttttactttcaccagcgtttctgggtgagcaaaaacaggaaggcaaaatgccgcaaaaaagggaataagggcgacacggaaatgttgaatactcatactcttcctttttcaatattattgaagcatttatcagggttattgtctcatgagcggatacatatttgaatgtatttagaaaaataaacaaataggggttccgcgcacatttccccgaaaagtgccacctaaattgtaagcgttaatattttgttaaaattcgcgttaaatttttgttaaatcagctcattttttaaccaataggccgaaatcggcaaaatcccttataaatcaaaagaatagaccgagatagggttgagtgttgttccagtttggaacaagagtccactattaaagaacgtggactccaacgtcaaagggcgaaaaaccgtctatcagggcgatggcccactacgtgaaccatcaccctaatcaagttttttggggtcgaggtgccgtaaagcactaaatcggaaccctaaagggagcccccgatttagagcttgacggggaaagccggcgaacgtggcgagaaaggaagggaagaaagcgaaaggagcgggcgctagggcgctggcaagtgtagcggtcacgctgcgcgtaaccaccacacccgccgcgcttaatgcgccgctacagggcgcgtcccattcgccattcaggctgcgcaactgttgggaagggcgatcggtgcgggcctcttcgctattacgccagctggcgaaagggggatgtgctgcaaggcgattaagttgggtaacgccagggttttcccagtcacgacgttgtaaaacgacggccagtgagcgcgcgtaatacgactcactatagggcgaattgggtaccgggccccccctcgatcgaggtcgacggtatcgggggagctcgcagggtctccattttgaagcgggaggtttgaacgcgcag

SEQ ID NO: 431 - DNA, 1856 bp, Artificial Sequence
  KP1 AAV2 rep
atgccggggttttacgagattgtgattaaggtccccagcgaccttgacgagcatctgcccggcatttctgacagctttgtgaactgggtggccgagaaggaatgggagttgccgccagattctgacatggatctgaatctgattgagcaggcacccctgaccgtggccgagaagctgcagcgcgactttctgacggaatggcgccgtgtgagtaaggccccggaggctcttttctttgtgcaatttgagaagggagagagctacttccacatgcacgtgctcgtggaaaccaccggggtgaaatccatggttttgggacgtttcctgagtcagattcgcgaaaaactgattcagagaatttaccgcgggatcgagccgactttgccaaactggttcgcggtcacaaagaccagaaatggcgccggaggcgggaacaaggtggtggatgagtgctacatccccaattacttgctccccaaaacccagcctgagctccagtgggcgtggactaatatggaacagtatttaagcgcctgtttgaatctcacggagcgtaaacggttggtggcgcagcatctgacgcacgtgtcgcagacgcaggagcagaacaaagagaatcagaatcccaattctgatgcgccggtgatcagatcaaaaacttcagccaggtacatggagctggtcgggtggctcgtggacaaggggattacctcggagaagcagtggatccaggaggaccaggcctcatacatctccttcaatgcggcctccaactcgcggtcccaaatcaaggctgccttggacaatgcgggaaagattatgagcctgactaaaaccgcccccgactacctggtgggccagcagcccgtggaggacatttccagcaatcggatttataaaattttggaactaaacgggtacgatccccaatatgcggcttccgtctttctgggatgggccacgaaaaagttcggcaagaggaacaccatctggctgtttgggcctgcaactaccgggaagaccaacatcgcggaggccatagcccacactgtgcccttctacgggtgcgtaaactggaccaatgagaactttcccttcaacgactgtgtcgacaagatggtgatctggtgggaggaggggaagatgaccgccaaggtcgtggagtcggccaaagccattctcggaggaagcaaggtgcgcgtggaccagaaatgcaagtcctcggcccagatagacccgactcccgtgatcgtcacctccaacaccaacatgtgcgccgtgattgacgggaactcaacgaccttcgaacaccagcagccgttgcaagaccggatgttcaaatttgaactcacccgccgtctggatcatgactttgggaaggtcaccaagcaggaagtcaaagactttttccggtgggcaaaggatcacgtggttgaggtggagcatgaattctacgtcaaaaagggtggagccaagaaaagacccgcccccagtgacgcagatataagtgagcccaaacgggtgcgcgagtcagttgcgcagccatcgacgtcagacgcggaagcttcgatcaactacgcagacaggtaccaaaacaaatgttctcgtcacgtgggcatgaatctgatgctgtttccctgcagacaatgcgagagaatgaatcagaattcaaatatctgcttcactcacggacagaaagactgtttagagtgctttcccgtgtcagaatctcaacccgtttctgtcgtcaaaaaggcgtatcagaaactgtgctacattcatcatatcatgggaaaggtgccagacgcttgcactgcctgcgatctggtcaatgtggatttggatgactgcatctt

SEQ ID NO: 432 - protein, 618 aa, Artificial Sequence
  KP1 AAV2 rep
MPGFYEIVIKVPSDLDEHLPGISDSFVNWVAEKEWELPPDSDMDLNLIEQAPLTVAEKLQRDFLTEWRRVSKAPEALFFVQFEKGESYFHMHVLVETTGVKSMVLGRFLSQIREKLIQRIYRGIEPTLPNWFAVTKTRNGAGGGNKVVDECYIPNYLLPKTQPELQWAWTNMEQYLSACLNLTERKRLVAQHLTHVSQTQEQNKENQNPNSDAPVIRSKTSARYMELVGWLVDKGITSEKQWIQEDQASYISFNAASNSRSQIKAALDNAGKIMSLTKTAPDYLVGQQPVEDISSNRIYKILELNGYDPQYAASVFLGWATKKFGKRNTIWLFGPATTGKTNIAEAIAHTVPFYGCVNWTNENFPFNDCVDKMVIWWEEGKMTAKVVESAKAILGGSKVRVDQKCKSSAQIDPTPVIVTSNTNMCAVIDGNSTTFEHQQPLQDRMFKFELTRRLDHDFGKVTKQEVKDFFRWAKDHVVEVEHEFYVKKGGAKKRPAPSDADISEPKRVRESVAQPSTSDAEASINYADRYQNKCSRHVGMNLMLFPCRQCERMNQNSNICFTHGQKDCLECFPVSESQPVSVVKKAYQKLCYIHHIMGKVPDACTACDLVNVDLDDCI

SEQ ID NO: 433 - DNA, 1438 bp, Artificial Sequence
  partial FIX intron
ggtttgtttccttttttaaaatacattgagtatgcttgccttttagatatagaaatatctgatgctgtcttcttcactaaattttgattacatgatttgacagcaatattgaagagtctaacagccagcacgcaggttggtaagtactggttctttgttagctaggttttcttcttcttcatttttaaaactaaatagatcgacaatgcttatgatgcatttatgtttaataaacactgttcagttcatgatttggtcatgtaattcctgttagaaaacattcatctccttggtttaaaaaaattaaaagtgggaaaacaaagaaatagcagaatatagtgaaaaaaaataaccacattatttttgtttggacttaccactttgaaatcaaaatgggaaacaaaagcacaaacaatggccttatttacacaaaaagtctgattttaagatatatgacatttcaaggtttcagaagtatgtaatgaggtgtgtctctaattttttaaattatatatcttcaatttaaagttttagttaaaacataaagattaacctttcattagcaagctgttagttatcaccaaagcttttcatggattaggaaaaaatcattttgtctctatgtcaaacatcttggagttgatatttggggaaacacaatactcagttgagttccctaggggagaaaagcaagcttaagaattgacataaagagtaggaagttagctaatgcaacatatatcactttgttttttcacaactacagtgactttatgtatttcccagaggaaggcatacagggaagaaattatcccatttggacaaacagcatgttctcacaggaagcatttatcacacttacttgtcaactttctagaatcaaatctagtagctgacagtaccaggatcaggggtgccaaccctaagcacccccagaaagctgactggccctgtggttcccactccagacatgatgtcagctgtgaaatcgacgtcgctggaccataattaggcttctgttcttcaggagacatttgttcaaagtcatttgggcaaccatattctgaaaacagcccagccagggtgatggatcactttgcaaagatcctcaatgagctattttcaagtgatgacaaagtgtgaagttaaccgctcatttgagaactttctttttcatccaaagtaaattcaaatatgattagaaatctgaccttttattactggaattctcttgactaaaagtaaaattgaattttaattcctaaatctccatgtgtatacagtactgtgggaacatcacagattttggctccatgccctaaagagaaattggctttcagattatttggattaaaaacaaagactttcttaagagatgtaaaattttcatgatgttttcttttttgctaaaactaaagaattattcttttacatttca

SEQ ID NO: 434 - DNA, 6157 bp, Artificial Sequence
  FIX intron I
gtttgtttccttttttaaaatacattgagtatgcttgccttttagatatagaaatatctgatgctgtcttcttcactaaattttgattacatgatttgacagcaatattgaagagtctaacagccagcacgcaggttggtaagtactggttctttgttagctaggttttcttcttcttcatttttaaaactaaatagatcgacaatgcttatgatgcatttatgtttaataaacactgttcagttcatgatttggtcatgtaattcctgttagaaaacattcatctccttggtttaaaaaaattaaaagtgggaaaacaaagaaatagcagaatatagtgaaaaaaaataaccacattatttttgtttggacttaccactttgaaatcaaaatgggaaacaaaagcacaaacaatggccttatttacacaaaaagtctgattttaagatatatgacatttcaaggtttcagaagtatgtaatgaggtgtgtctctaattttttaaattatatatcttcaatttaaagttttagttaaaacataaagattaacctttcattagcaagctgttagttatcaccaaagcttttcatggattaggaaaaaatcattttgtctctatgtcaaacatcttggagttgatatttggggaaacacaatactcagttgagttccctaggggagaaaagcaagcttaagaattgacataaagagtaggaagttagctaatgcaacatatatcactttgttttttcacaactacagtgactttatgtatttcccagaggaaggcatacagggaagaaattatcccatttggacaaacagcatgttctcacaggaagcatttatcacacttacttgtcaactttctagaatcaaatctagtagctgacagtaccaggatcaggggtgccaaccctaagcacccccagaaagctgactggccctgtggttcccactccagacatgatgtcagctgtgaaatcagactgaaatgctgaaataacgataaaaaaaaatacagaggttaaactagcaaagtgagtaaagtcaagggataaagaaaatttgttggaaaactcacaaagcaggacataaagcaaggccattagatatatctcattagtgtgacatctgggaggacaaagcatccaaaccctttcttctatataagtggtgagatgatgaaggttgtaagagggcttctgcccccttgaagacttcagatgctggggaaaggatagataagaataaggatgaaccaggcttttggagcctgggaaataatgactagcgataaacctgaagggaagttaagtatacgatccccagataatactaaggagaaaggcaatgtgattctgcagccattgtagccagagataataagcccttgaggaaggggccaggggaatttttctaaggatagacagtattaatgcagcactctcttctgctattaaactctcattggcttctaaaaggagtttcggtgagtgatttgctgagatgttgcattttcatggctgctgcctttaggtattattgcaacagtttggaattttgaaattaaaacagttctgtaaaaccagtttagttttgtaaagtgtatgcatcaaagatgtccttcattcagacattactgagttacaactatggtgccaggtactgtgtcagggtactaggggtatggggataaaccagactccctctttgatctaaagcagcatgaggccaggtgagaggtttcaatataatgtgataaaatgtgcactaggtactaagggatcatagagaaaggaacacattaaatggggaaacaattgatagagagagaatattttcatctgggtcttaaaagatgagtaggcgttctctctctttaaatgtctgatataagggcattttatgcaaagaggatcactcgtgcaaagactcagatttgcaagaacgtgaggtatttcaggagttttgtatggttccatatggactatgacaagtgagacaggtaaactaggcagagctggtcatcagataatgaagtcattaacctaaggagattggacaataaaatgcaatatggaggtatcgaagtataaacataaggagtaccactgatggctgatttaggatgcccagtctggcaacacgctaatgaaatgatagtgggggagggggccgtaccaagactaggagagagcagtcctgagactattgcaattatctgcgggagacataaaggctagaacctgaacagtagcagtacaaaaaaagaggggagttcaaatgatattaaggaagtagaagtggtatgacttaaccatctgggtatggaaggggaaatggctagagtcttggggactttgtgtttgatgtgattatggaccacagaataatgtctaagagaactggctctttagtctgactgccagagtctgaatcctgaatgttttagtatgttaccttgggcaaagcccttagcctctatgaatctatcttcctcattcataaaaataagatgacagtgcctatctcgtgggacttttgtgaggatgaagtgagataatggatgcaaagttactgagcacagtgtccaacacagcagaagcattacatatacattagctattactggctacattatgatatacagttagggagttggaaagataatctgaaattcaggagacgtatctgactataggtgagtatttggaactcattgttctgtaaacagtagttacagccacgtgtgtgggcatctggagagtgagcatggatattgtgatacctagtacagtgcctggcagtagtggttgtatgctcagtaaattttgttgacagggtcagggccggactagactgtggtaagcaaggcctgtagggcataaatatacttgtatgccccgagaagtgaggacctcttaaatattgtgccctacatgccttgtttggttcactcttgtcccagccctagcaagtatatataaggtgaaaaaggaaaaagctgaggctggagcctgggagaaccctggacatttaagggccatggagaggaacaggagttaatcaattcaagtgctggatggataacaggagttagagcaaagcggggaaccagaatagagtgattattataaaaagagtttcctaaaaagggagagatcaacaattagaaattatttagagcagccagtaaatacataaactcaaaattattctttaggtcattcctgattgtgacaatagtcatttcattatataaatgtgattaaggaaggaaaagagctacacagaagttattaaagagctaaagagaattgagaaatttaaaacagaagaaagtagggccaacatgaaaggagtagggagaaaaagagataaccagcatattgtctcactgatcctgccaacacctgtgagatagatattcttattatactactgttaaacctaatttacatttgacaaagttaaggttcagagcttgtgtgacttgtccaaggtcacaggtctagaggaggcagatacttgattcaaacctatttctgtctgatctgattctaaagtctgttttttcactcaaccacactgtacagtcagctctccttgtgagttccacagccacagattcaattaactgcagatcaaaaatattcaagaaaaaaatggatggttgcatctctactgaacatgtacagactcttttatctttcattattccctaaacaatacagcataacaactatttacatagcatttacattgtattagctattaagagaaacctagagatgatttaaagtacaaaggaggatgtgtttaggttatatgcaaatagtaagccatttttatatcggagacttgagcatccacagatcttgatatttgcagggggtcttgccaccaattttccatggatactgaggaacgactgtaaatggatgcaggcatggatgctatttaggagtgtccagggccaagtaaatgagttgctgagcagagaggtgggtggaggctgtgaggcatcaatatgtggtggcatccatctgcattttggtgatttttttccttcacagtcctcggctgtctgggaagagaaggatgaaggcagatggctgctccaatttaggggctaggattgcagggtgggcacagcattgcaaacgagtgaaggaaattgagaaatatggccaatgaagagttgaagagaggcctggcatggtggctcacacctataatcccagcactttcagaggcccaggcaggcagatcacttgaggtcaggagttcgacaccagcctggccaacaaggtgaaatggtgaaaccccggctttactaaaaatacaaaaattagctgggcatggtggcgggtgcctgtaatcccagctacttgggaggctgaggcaggagaatagcttgaacctgggagatggaggttgcagtgagctgagatcgcaccactgcactccagcctgggcgacagagcaagactctgtcaaaaaaaaaagagttgaagagaaaaagtctaggctaaattcaaagaaaaaaagtgagcccaaaaggaacttgcagagcaagggaaaagcagggatgtcaagggactagaacactccataaagtgaacagctgcaatgaaaataagggaagaaagtttagttcatctccgtttctttcctttcctttttactttcctttctcttcctttttggagttaatcaggaagtagtcccaaataccccagaaagttcatcttataagcccttggtcctcttgagatggtatcagatatattgctagacccttgaagaaaggaacaactccaggcaacttcttgagtccctgttattaattttatacatacacacacatatatgtatatacatgaaaacacacaaacacatgtgtgtgtatacagccatgcattccttaacaatggggatatattctgagaaatgtgtcattaagcaatttcatcattgtgcgaacataatagagtgtacttacctaaacctaaatggtatagcttactacatacctaggttgtattgatgtggcctattgctcctaggctcctgggctgcaaacctgtacagcatgtgactgtactgaacactgtaggcaatggtaacagtggtatttgtgtatctaaacatagaaaaggtacagtgaaaatacagtattataaccttatgggaccactgtcgtataatgtggtccatcattgaccaaaatgtcattgtgcagcaaatgattatctcatatatatatatatatgatatgatatatatgatatatatgtgtgtgtatatatgtatacatatatatgtgtacatatatgtatacatatatacacacacatatatatgtacacacatatatgtatatatatgtacacacatatatgtatatatatatgtacacacacacacatagagagagagagagaggagaggagaggaaggagggagggaaggagaaatatgattcagatagagacatctatcctccagagttcaggagtgtctcttcagactaggtagatgtagcttaaaaaaaacatatcctgaattctagagagatgcttaaatcactgcaattcctataacacttgccaaccaaaggtgctgttgatctgaaattgcttttttaaattaatgcagtgatttttctttaacatctagtgacagacactggggtcacatttgcagctggaccataattaggcttctgttcttcaggagacatttgttcaaagtcatttgggcaaccatattctgaaaacagcccagccagggtgatggatcactttgcaaagatcctcaatgagctattttcaagtgatgacaaagtgtgaagttaaccgctcatttgagaactttctttttcatccaaagtaaattcaaatatgattagaaatctgaccttttattactggaattctcttgactaaaagtaaaattgaattttaattcctaaatctccatgtgtatacagtactgtgggaacatcacagattttggctccatgccctaaagagaaattggctttcagattatttggattaaaaacaaagactttcttaagagatgtaaaattttcatgatgttttcttttttgctaaaactaaagaattattcttttacatttcag

SEQ ID NO: 435 - DNA, 119 bp, Artificial Sequence
  AAV2 Left ITR
ctgcgcgctcgctcgctcactgaggccgcccgggcgtcgggcgacctttggtcgcccggcctcagtgagcgagcgagcgcgcagagagggagtggccaactccatcactaggggttcct

SEQ ID NO: 436 - DNA, 130 bp, Artificial Sequence
  AAV2 Right ITR
aggaacccctagtgatggagttggccactccctctctgcgcgctcgctcgctcactgaggccgggcgaccaaaggtcgcccgacgcccgggctttgcccgggcggcctcagtgagcgagcgagcgcgcag

SEQ ID NO: 437 - DNA, 119 bp, Artificial Sequence
  short AAV2 Right ITR
aggaacccctagtgatggagttggccactccctctctgcgcgctcgctcgctcactgaggccgggcgaccaaaggtcgcccgacgcccgggcggcctcagtgagcgagcgagcgcgcag

SEQ ID NO: 438 - DNA, 321 bp, Artificial Sequence
  ApoE/C1 gene locus (enhancer)
aggctcagaggcacacaggagtttctgggctcaccctgcccccttccaacccctcagttcccatcctccagcagctgtttgtgtgctgcctctgaagtccacactgaacaaacttcagcctactcatgtccctaaaatgggcaaacattgcaagcagcaaacagcaaacacacagccctccctgcctgctgaccttggagctggggcagaggtcagagacctctctgggcccatgccacctccaacatccactcgaccccttggaatttcggtggagaggagcagaggttgtcctggcgtggtttaggtagtgtgagaggg

SEQ ID NO: 439 - DNA, 72 bp, Artificial Sequence
  Serpin AI (liver specific enhancer)
gggggaggctgctggtgaatattaaccaaggtcaccccagttatcggaggagcaaacaggggctaagtccac

SEQ ID NO: 440 - DNA, 393 bp, Artificial Sequence
  huSerpin A antitrypsin liver specific promoter (partial)
gatcttgctaccagtggaacagccactaaggattctgcagtgagagcagagggccagctaagtggtactctcccagagactgtctgactcacgccaccccctccaccttggacacaggacgctgtggtttctgagccaggtacaatgactcctttcggtaagtgcagtggaagctgtacactgcccaggcaaagcgtccgggcagcgtaggcgggcgactcagatcccagccagtggacttagcccctgtttgctcctccgataactggggtgaccttggttaatattcaccagcagcctcccccgttgcccctctggatccactgcttaaatacggacgaggacagggccctgtctcctcagcttcaggcaccaccactgacctgggacagt

SEQ ID NO: 441 - DNA, 224 bp, Artificial Sequence
  transthyretin (TTR ) liver specific promoter
gtctgtctgcacatttcgtagagcgagtgttccgatactctaatctccctaggcaaggttcatatttgtgtaggttacttattctccttttgttgactaagtcaataatcagaatcagcaggtttggagtcagcttggcagggatcagcagcctgggttggaaggagggggtataaaagccccttcaccaggagaagccgtcacacagatccacaagctcctga

SEQ ID NO: 442 - DNA, 6 bp, Artificial Sequence
  Kozak
gccacc

SEQ ID NO: 443 - DNA, 225 bp, Artificial Sequence
  bGHpolyA
ctgtgccttctagttgccagccatctgttgtttgcccctcccccgtgccttccttgaccctggaaggtgccactcccactgtcctttcctaataaaatgaggaaattgcatcgcattgtctgagtaggtgtcattctattctggggggtggggtggggcaggacagcaagggggaggattgggaagacaatagcaggcatgctggggatgcggtgggctctatgg

SEQ ID NO: 444 - DNA, 84 bp, Homo sapiens
  sig_peptide (1)...(84): hFIX Signal Peptide
atgcagcgcgtgaacatgatcatggcagaatcaccaggcctcatcaccatctgccttttaggatatctactcagtgctgaatgt

SEQ ID NO: 445 - DNA, 3 bp, Homo sapiens
  hFIX partial propeptide
aca

SEQ ID NO: 446 - DNA, 51 bp, Homo sapiens
  hFIX Propeptide
gtttttcttgatcatgaaaacgccaacaaaattctgaatcggccaaagagg

SEQ ID NO: 447 - DNA, 7585 bp, Artificial Sequence
  AAV-human wild type FIX mouse optimized vector
  repeat_region (1597)...(1715): ITR
  enhancer (1781)...(2101): ApoE/C1
  promoter (2111)...(2503): huSerpin A antitrypsin liver specific promoter (partial)
  misc_feature (2598)...(2603): kozak
  sig_peptide (2604)...(2687): FIX signal sequence
  misc_feature (2688)...(2690): FIX propeptide sequence
  intron (2691)...(4128): FIX partial intron 1
  misc_feature (4129)...(4179): FIX propeptide sequence
  misc_feature (4180)...(5427): FIX zymogen
  polyA_signal (5539)...(5763): bovine growth hormone polyadenylation signal
  repeat_region (5877)...(6006): ITR
gggatcatgtaactcgccttgatcgttgggaaccggagctgaatgaagccataccaaacgacgagcgtgacaccacgatgcctgtagcaatggcaacaacgttgcgcaaactattaactggcgaactacttactctagcttcccggcaacaattaatagactggatggaggcggataaagttgcaggaccacttctgcgctcggcccttccggctggctggtttattgctgataaatctggagccggtgagcgtgggtctcgcggtatcattgcagcactggggccagatggtaagccctcccgtatcgtagttatctacacgacggggagtcaggcaactatggatgaacgaaatagacagatcgctgagataggtgcctcactgattaagcattggtaactgtcagaccaagtttactcatatatactttagattgatttaaaacttcatttttaatttaaaaggatctaggtgaagatcctttttgataatctcatgaccaaaatcccttaacgtgagttttcgttccactgagcgtcagaccccgtagaaaagatcaaaggatcttcttgagatcctttttttctgcgcgtaatctgctgcttgcaaacaaaaaaaccaccgctaccagcggtggtttgtttgccggatcaagagctaccaactctttttccgaaggtaactggcttcagcagagcgcagataccaaatactgttcttctagtgtagccgtagttaggccaccacttcaagaactctgtagcaccgcctacatacctcgctctgctaatcctgttaccagtggctgctgccagtggcgataagtcgtgtcttaccgggttggactcaagacgatagttaccggataaggcgcagcggtcgggctgaacggggggttcgtgcacacagcccagcttggagcgaacgacctacaccgaactgagatacctacagcgtgagctatgagaaagcgccacgcttcccgaagggagaaaggcggacaggtatccggtaagcggcagggtcggaacaggagagcgcacgagggagcttccagggggaaacgcctggtatctttatagtcctgtcgggtttcgccacctctgacttgagcgtcgatttttgtgatgctcgtcaggggggcggagcctatggaaaaacgccagcaacgcggcctttttacggttcctggccttttgctggccttttgctcacatgttctttcctgcgttatcccctgattctgtggataaccgtattaccgcctttgagtgagctgataccgctcgccgcagccgaacgaccgagcgcagcgagtcagtgagcgaggaagcggaagagcgcccaatacgcaaaccgcctctccccgcgcgttggccgattcattaatgcagctggcacgacaggtttcccgactggaaagcgggcagtgagcgcaacgcaattaatgtgagttagctcactcattaggcaccccaggctttacactttatgcttccggctcgtatgttgtgtggaattgtgagcggataacaatttcacacaggaaacagctatgaccatgattacgccaagcttgcatgcctgcaggcagctgcgcgctcgctcgctcactgaggccgcccgggcgtcgggcgacctttggtcgcccggcctcagtgagcgagcgagcgcgcagagagggagtggccaactccatcactaggggttcctggaggggtggagtcgtgacgtaaagatctgatatcatcgatcgcgatgcattaattaagcggccgaggctcagaggcacacaggagtttctgggctcaccctgcccccttccaacccctcagttcccatcctccagcagctgtttgtgtgctgcctctgaagtccacactgaacaaacttcagcctactcatgtccctaaaatgggcaaacattgcaagcagcaaacagcaaacacacagccctccctgcctgctgaccttggagctggggcagaggtcagagacctctctgggcccatgccacctccaacatccactcgaccccttggaatttcggtggagaggagcagaggttgtcctggcgtggtttaggtagtgtgagaggggtacccggggatcttgctaccagtggaacagccactaaggattctgcagtgagagcagagggccagctaagtggtactctcccagagactgtctgactcacgccaccccctccaccttggacacaggacgctgtggtttctgagccaggtacaatgactcctttcggtaagtgcagtggaagctgtacactgcccaggcaaagcgtccgggcagcgtaggcgggcgactcagatcccagccagtggacttagcccctgtttgctcctccgataactggggtgaccttggttaatattcaccagcagcctcccccgttgcccctctggatccactgcttaaatacggacgaggacagggccctgtctcctcagcttcaggcaccaccactgacctgggacagtgaatgatccccctgatctgcggcctcgacggtatcgataagcttgatatcgaattctagtcgtcgaccactttcacaatctgctagcaaaggttgccaccatgcagcgcgtgaacatgattatggccgagagccctggcctgatcaccatctgcctgctgggctacctgctgagcgccgagtgtacaggtttgtttccttttttaaaatacattgagtatgcttgccttttagatatagaaatatctgatgctgtcttcttcactaaattttgattacatgatttgacagcaatattgaagagtctaacagccagcacgcaggttggtaagtactggttctttgttagctaggttttcttcttcttcatttttaaaactaaatagatcgacaatgcttatgatgcatttatgtttaataaacactgttcagttcatgatttggtcatgtaattcctgttagaaaacattcatctccttggtttaaaaaaattaaaagtgggaaaacaaagaaatagcagaatatagtgaaaaaaaataaccacattatttttgtttggacttaccactttgaaatcaaaatgggaaacaaaagcacaaacaatggccttatttacacaaaaagtctgattttaagatatatgacatttcaaggtttcagaagtatgtaatgaggtgtgtctctaattttttaaattatatatcttcaatttaaagttttagttaaaacataaagattaacctttcattagcaagctgttagttatcaccaaagcttttcatggattaggaaaaaatcattttgtctctatgtcaaacatcttggagttgatatttggggaaacacaatactcagttgagttccctaggggagaaaagcaagcttaagaattgacataaagagtaggaagttagctaatgcaacatatatcactttgttttttcacaactacagtgactttatgtatttcccagaggaaggcatacagggaagaaattatcccatttggacaaacagcatgttctcacaggaagcatttatcacacttacttgtcaactttctagaatcaaatctagtagctgacagtaccaggatcaggggtgccaaccctaagcacccccagaaagctgactggccctgtggttcccactccagacatgatgtcagctgtgaaatcgacgtcgctggaccataattaggcttctgttcttcaggagacatttgttcaaagtcatttgggcaaccatattctgaaaacagcccagccagggtgatggatcactttgcaaagatcctcaatgagctattttcaagtgatgacaaagtgtgaagttaaccgctcatttgagaactttctttttcatccaaagtaaattcaaatatgattagaaatctgaccttttattactggaattctcttgactaaaagtaaaattgaattttaattcctaaatctccatgtgtatacagtactgtgggaacatcacagattttggctccatgccctaaagagaaattggctttcagattatttggattaaaaacaaagactttcttaagagatgtaaaattttcatgatgttttcttttttgctaaaactaaagaattattcttttacatttcagtgttcctggaccacgagaacgccaacaagatcctgaacagacccaagagatacaacagcggcaagctggaagagttcgtgcagggcaacctggaacgcgagtgcatggaagagaagtgcagcttcgaagaggccagagaggtgttcgagaacaccgagagaaccaccgagttctggaagcagtacgtggacggcgaccagtgcgagagcaacccttgtctgaacggcggcagctgcaaggacgacatcaacagctacgagtgctggtgccccttcggcttcgagggcaagaactgcgagctggacgtgacctgcaacatcaagaacggcagatgcgagcagttctgcaagaacagcgccgacaacaaggtcgtgtgctcctgcaccgagggctacagactggccgagaaccagaagtcctgcgagcccgctgtgcctttcccatgcggaagagtgtccgtgtcccagaccagcaagctgaccagagccgagacagtgttccccgacgtggactacgtgaacagcaccgaggccgagacaatcctggacaacatcacccagagcacccagtccttcaacgacttcaccagagtcgtgggcggcgaggatgctaagcctggccagttcccgtggcaggtggtgctgaacggaaaggtggacgccttctgcggcggctccatcgtgaacgagaagtggatcgtgacagccgcccactgcgtggaaaccggcgtgaagatcacagtggtggccggcgagcacaacatcgaggaaaccgagcacacagagcagaaaagaaacgtgatcaggatcatcccccaccacaactacaacgccgccatcaacaagtacaaccacgatatcgccctgctggaactggacgagcccctggtgctgaatagctacgtgacccccatctgtatcgccgacaaagagtacaccaacatctttctgaagttcggcagcggctacgtgtccggctggggcagagtgtttcacaagggcagatccgctctggtgctgcagtacctgagagtgcctctggtggacagagccacctgtctgagaagcaccaagttcaccatctacaacaacatgttctgcgctggcttccacgagggcggcagagactcttgtcagggcgattctggcggccctcacgtgacagaggtggaaggcaccagctttctgaccggcatcatcagctggggcgaggaatgcgccatgaaggggaagtacggcatctacaccaaggtgtccagatacgtgaactggatcaaagaaaagaccaagctgacataatgaaagatggatttccaaggttaattcattggaattgaaaattaacagccccccccccccccccctgcagatctcgagccgaattcctgcagcccgggggatcagcctcgactgtgccttctagttgccagccatctgttgtttgcccctcccccgtgccttccttgaccctggaaggtgccactcccactgtcctttcctaataaaatgaggaaattgcatcgcattgtctgagtaggtgtcattctattctggggggtggggtggggcaggacagcaagggggaggattgggaagacaatagcaggcatgctggggatgcggtgggctctatggcttctgaggcggaaagaaccagctggggctcgagatccactagactagtgtacacgcgtgatatcagatctgttacgtagataagtagcatggcgggttaatcattaactacaaggaacccctagtgatggagttggccactccctctctgcgcgctcgctcgctcactgaggccgggcgaccaaaggtcgcccgacgcccgggctttgcccgggcggcctcagtgagcgagcgagcgcgcagctgcctgcaggtcgactctagaggatccccgggtaccgagctcgaattcactggccgtcgttttacaacgtcgtgactgggaaaaccctggcgttacccaacttaatcgccttgcagcacatccccctttcgccagctggcgtaatagcgaagaggcccgcaccgatcgcccttcccaacagttgcgcagcctgaatggcgaatggcgcctgatgcggtattttctccttacgcatctgtgcggtatttcacaccgcatacgtcaaagcaaccatagtacgcgccctgtagcggcgcattaagcgcggcgggtgtggtggttacgcgcagcgtgaccgctacacttgccagcgcttagcgcccgctcctttcgctttcttcccttcctttctcgccacgttcgccggctttccccgtcaagctctaaatcgggggctccctttagggttccgatttagtgctttacggcacctcgaccccaaaaaacttgatttgggtgatggttcacgtagtgggccatcgccctgatagacggtttttcgccctttgacgttggagtccacgttctttaatagtggactcttgttccaaactggaacaacactcaactctatctcgggctattcttttgatttataagggattttgccgatttcggtctattggttaaaaaatgagctgatttaacaaaaatttaacgcgaattttaacaaaatattaacgtttacaattttatggtgcactctcagtacaatctgctctgatgccgcatagttaagccagccccgacacccgccaacacccgctgacgcgccctgacgggcttgtctgctcccggcatccgcttacagacaagctgtgaccgtctccgggagctgcatgtgtcagaggttttcaccgtcatcaccgaaacgcgcgagacgaaagggcctcgtgatacgcctatttttataggttaatgtcatgataataatggtttcttagacgtcaggtggcacttttcggggaaatgtgcgcggaacccctatttgtttatttttctaaatacattcaaatatgtatccgctcatgagacaataaccctgataaatgcttcaataatattgaaaaaggaagagtatgagtattcaacatttccgtgtcgcccttattcccttttttgcggcattttgccttcctgtttttgctcacccagaaacgctggtgaaagtaaaagatgctgaagatcagttgggtgcacgagtgggttacatcgaactggatctcaacagcggtaagatccttgagagttttcgccccgaagaacgttttccaatgatgagcacttttaaagttctgctatgtggcgcggtattatcccgtattgacgccgggcaagagcaactcggtcgccgcatacactattctcagaatgacttggttgagtactcaccagtcacagaaaagcatcttacggatggcatgacagtaagagaattatgcagtgctgccataaccatgagtgataacactgcggccaacttacttctgacaacgatcggaggaccgaaggagctaaccgcttttttgcacaacatgg

SEQ ID NO: 448 - DNA, 7585 bp, Artificial Sequence
  AAV-human FIX  R318Y/R338E/T343R mouse optimized vector
gggatcatgtaactcgccttgatcgttgggaaccggagctgaatgaagccataccaaacgacgagcgtgacaccacgatgcctgtagcaatggcaacaacgttgcgcaaactattaactggcgaactacttactctagcttcccggcaacaattaatagactggatggaggcggataaagttgcaggaccacttctgcgctcggcccttccggctggctggtttattgctgataaatctggagccggtgagcgtgggtctcgcggtatcattgcagcactggggccagatggtaagccctcccgtatcgtagttatctacacgacggggagtcaggcaactatggatgaacgaaatagacagatcgctgagataggtgcctcactgattaagcattggtaactgtcagaccaagtttactcatatatactttagattgatttaaaacttcatttttaatttaaaaggatctaggtgaagatcctttttgataatctcatgaccaaaatcccttaacgtgagttttcgttccactgagcgtcagaccccgtagaaaagatcaaaggatcttcttgagatcctttttttctgcgcgtaatctgctgcttgcaaacaaaaaaaccaccgctaccagcggtggtttgtttgccggatcaagagctaccaactctttttccgaaggtaactggcttcagcagagcgcagataccaaatactgttcttctagtgtagccgtagttaggccaccacttcaagaactctgtagcaccgcctacatacctcgctctgctaatcctgttaccagtggctgctgccagtggcgataagtcgtgtcttaccgggttggactcaagacgatagttaccggataaggcgcagcggtcgggctgaacggggggttcgtgcacacagcccagcttggagcgaacgacctacaccgaactgagatacctacagcgtgagctatgagaaagcgccacgcttcccgaagggagaaaggcggacaggtatccggtaagcggcagggtcggaacaggagagcgcacgagggagcttccagggggaaacgcctggtatctttatagtcctgtcgggtttcgccacctctgacttgagcgtcgatttttgtgatgctcgtcaggggggcggagcctatggaaaaacgccagcaacgcggcctttttacggttcctggccttttgctggccttttgctcacatgttctttcctgcgttatcccctgattctgtggataaccgtattaccgcctttgagtgagctgataccgctcgccgcagccgaacgaccgagcgcagcgagtcagtgagcgaggaagcggaagagcgcccaatacgcaaaccgcctctccccgcgcgttggccgattcattaatgcagctggcacgacaggtttcccgactggaaagcgggcagtgagcgcaacgcaattaatgtgagttagctcactcattaggcaccccaggctttacactttatgcttccggctcgtatgttgtgtggaattgtgagcggataacaatttcacacaggaaacagctatgaccatgattacgccaagcttgcatgcctgcaggcagctgcgcgctcgctcgctcactgaggccgcccgggcgtcgggcgacctttggtcgcccggcctcagtgagcgagcgagcgcgcagagagggagtggccaactccatcactaggggttcctggaggggtggagtcgtgacgtaaagatctgatatcatcgatcgcgatgcattaattaagcggccgaggctcagaggcacacaggagtttctgggctcaccctgcccccttccaacccctcagttcccatcctccagcagctgtttgtgtgctgcctctgaagtccacactgaacaaacttcagcctactcatgtccctaaaatgggcaaacattgcaagcagcaaacagcaaacacacagccctccctgcctgctgaccttggagctggggcagaggtcagagacctctctgggcccatgccacctccaacatccactcgaccccttggaatttcggtggagaggagcagaggttgtcctggcgtggtttaggtagtgtgagaggggtacccggggatcttgctaccagtggaacagccactaaggattctgcagtgagagcagagggccagctaagtggtactctcccagagactgtctgactcacgccaccccctccaccttggacacaggacgctgtggtttctgagccaggtacaatgactcctttcggtaagtgcagtggaagctgtacactgcccaggcaaagcgtccgggcagcgtaggcgggcgactcagatcccagccagtggacttagcccctgtttgctcctccgataactggggtgaccttggttaatattcaccagcagcctcccccgttgcccctctggatccactgcttaaatacggacgaggacagggccctgtctcctcagcttcaggcaccaccactgacctgggacagtgaatgatccccctgatctgcggcctcgacggtatcgataagcttgatatcgaattctagtcgtcgaccactttcacaatctgctagcaaaggttgccaccatgcagcgcgtgaacatgattatggccgagagccctggcctgatcaccatctgcctgctgggctacctgctgagcgccgagtgtacaggtttgtttccttttttaaaatacattgagtatgcttgccttttagatatagaaatatctgatgctgtcttcttcactaaattttgattacatgatttgacagcaatattgaagagtctaacagccagcacgcaggttggtaagtactggttctttgttagctaggttttcttcttcttcatttttaaaactaaatagatcgacaatgcttatgatgcatttatgtttaataaacactgttcagttcatgatttggtcatgtaattcctgttagaaaacattcatctccttggtttaaaaaaattaaaagtgggaaaacaaagaaatagcagaatatagtgaaaaaaaataaccacattatttttgtttggacttaccactttgaaatcaaaatgggaaacaaaagcacaaacaatggccttatttacacaaaaagtctgattttaagatatatgacatttcaaggtttcagaagtatgtaatgaggtgtgtctctaattttttaaattatatatcttcaatttaaagttttagttaaaacataaagattaacctttcattagcaagctgttagttatcaccaaagcttttcatggattaggaaaaaatcattttgtctctatgtcaaacatcttggagttgatatttggggaaacacaatactcagttgagttccctaggggagaaaagcaagcttaagaattgacataaagagtaggaagttagctaatgcaacatatatcactttgttttttcacaactacagtgactttatgtatttcccagaggaaggcatacagggaagaaattatcccatttggacaaacagcatgttctcacaggaagcatttatcacacttacttgtcaactttctagaatcaaatctagtagctgacagtaccaggatcaggggtgccaaccctaagcacccccagaaagctgactggccctgtggttcccactccagacatgatgtcagctgtgaaatcgacgtcgctggaccataattaggcttctgttcttcaggagacatttgttcaaagtcatttgggcaaccatattctgaaaacagcccagccagggtgatggatcactttgcaaagatcctcaatgagctattttcaagtgatgacaaagtgtgaagttaaccgctcatttgagaactttctttttcatccaaagtaaattcaaatatgattagaaatctgaccttttattactggaattctcttgactaaaagtaaaattgaattttaattcctaaatctccatgtgtatacagtactgtgggaacatcacagattttggctccatgccctaaagagaaattggctttcagattatttggattaaaaacaaagactttcttaagagatgtaaaattttcatgatgttttcttttttgctaaaactaaagaattattcttttacatttcagtgttcctggaccacgagaacgccaacaagatcctgaacagacccaagagatacaacagcggcaagctggaagagttcgtgcagggcaacctggaacgcgagtgcatggaagagaagtgcagcttcgaagaggccagagaggtgttcgagaacaccgagagaaccaccgagttctggaagcagtacgtggacggcgaccagtgcgagagcaacccttgtctgaacggcggcagctgcaaggacgacatcaacagctacgagtgctggtgccccttcggcttcgagggcaagaactgcgagctggacgtgacctgcaacatcaagaacggcagatgcgagcagttctgcaagaacagcgccgacaacaaggtcgtgtgctcctgcaccgagggctacagactggccgagaaccagaagtcctgcgagcccgctgtgcctttcccatgcggaagagtgtccgtgtcccagaccagcaagctgaccagagccgagacagtgttccccgacgtggactacgtgaacagcaccgaggccgagacaatcctggacaacatcacccagagcacccagtccttcaacgacttcaccagagtcgtgggcggcgaggatgctaagcctggccagttcccgtggcaggtggtgctgaacggaaaggtggacgccttctgcggcggctccatcgtgaacgagaagtggatcgtgacagccgcccactgcgtggaaaccggcgtgaagatcacagtggtggccggcgagcacaacatcgaggaaaccgagcacacagagcagaaaagaaacgtgatcaggatcatcccccaccacaactacaacgccgccatcaacaagtacaaccacgatatcgccctgctggaactggacgagcccctggtgctgaatagctacgtgacccccatctgtatcgccgacaaagagtacaccaacatctttctgaagttcggcagcggctacgtgtccggctggggcagagtgtttcacaagggctactccgctctggtgctgcagtacctgagagtgcctctggtggacagagccacctgtctggaaagcaccaagttcagaatctacaacaacatgttctgcgctggcttccacgagggcggcagagactcttgtcagggcgattctggcggccctcacgtgacagaggtggaaggcaccagctttctgaccggcatcatcagctggggcgaggaatgcgccatgaaggggaagtacggcatctacaccaaggtgtccagatacgtgaactggatcaaagaaaagaccaagctgacataatgaaagatggatttccaaggttaattcattggaattgaaaattaacagccccccccccccccccctgcagatctcgagccgaattcctgcagcccgggggatcagcctcgactgtgccttctagttgccagccatctgttgtttgcccctcccccgtgccttccttgaccctggaaggtgccactcccactgtcctttcctaataaaatgaggaaattgcatcgcattgtctgagtaggtgtcattctattctggggggtggggtggggcaggacagcaagggggaggattgggaagacaatagcaggcatgctggggatgcggtgggctctatggcttctgaggcggaaagaaccagctggggctcgagatccactagactagtgtacacgcgtgatatcagatctgttacgtagataagtagcatggcgggttaatcattaactacaaggaacccctagtgatggagttggccactccctctctgcgcgctcgctcgctcactgaggccgggcgaccaaaggtcgcccgacgcccgggctttgcccgggcggcctcagtgagcgagcgagcgcgcagctgcctgcaggtcgactctagaggatccccgggtaccgagctcgaattcactggccgtcgttttacaacgtcgtgactgggaaaaccctggcgttacccaacttaatcgccttgcagcacatccccctttcgccagctggcgtaatagcgaagaggcccgcaccgatcgcccttcccaacagttgcgcagcctgaatggcgaatggcgcctgatgcggtattttctccttacgcatctgtgcggtatttcacaccgcatacgtcaaagcaaccatagtacgcgccctgtagcggcgcattaagcgcggcgggtgtggtggttacgcgcagcgtgaccgctacacttgccagcgcttagcgcccgctcctttcgctttcttcccttcctttctcgccacgttcgccggctttccccgtcaagctctaaatcgggggctccctttagggttccgatttagtgctttacggcacctcgaccccaaaaaacttgatttgggtgatggttcacgtagtgggccatcgccctgatagacggtttttcgccctttgacgttggagtccacgttctttaatagtggactcttgttccaaactggaacaacactcaactctatctcgggctattcttttgatttataagggattttgccgatttcggtctattggttaaaaaatgagctgatttaacaaaaatttaacgcgaattttaacaaaatattaacgtttacaattttatggtgcactctcagtacaatctgctctgatgccgcatagttaagccagccccgacacccgccaacacccgctgacgcgccctgacgggcttgtctgctcccggcatccgcttacagacaagctgtgaccgtctccgggagctgcatgtgtcagaggttttcaccgtcatcaccgaaacgcgcgagacgaaagggcctcgtgatacgcctatttttataggttaatgtcatgataataatggtttcttagacgtcaggtggcacttttcggggaaatgtgcgcggaacccctatttgtttatttttctaaatacattcaaatatgtatccgctcatgagacaataaccctgataaatgcttcaataatattgaaaaaggaagagtatgagtattcaacatttccgtgtcgcccttattcccttttttgcggcattttgccttcctgtttttgctcacccagaaacgctggtgaaagtaaaagatgctgaagatcagttgggtgcacgagtgggttacatcgaactggatctcaacagcggtaagatccttgagagttttcgccccgaagaacgttttccaatgatgagcacttttaaagttctgctatgtggcgcggtattatcccgtattgacgccgggcaagagcaactcggtcgccgcatacactattctcagaatgacttggttgagtactcaccagtcacagaaaagcatcttacggatggcatgacagtaagagaattatgcagtgctgccataaccatgagtgataacactgcggccaacttacttctgacaacgatcggaggaccgaaggagctaaccgcttttttgcacaacatgg

SEQ ID NO: 449 - DNA, 7585 bp, Artificial Sequence
  AAV-human FIX R338L mouse optimized vector
gggatcatgtaactcgccttgatcgttgggaaccggagctgaatgaagccataccaaacgacgagcgtgacaccacgatgcctgtagcaatggcaacaacgttgcgcaaactattaactggcgaactacttactctagcttcccggcaacaattaatagactggatggaggcggataaagttgcaggaccacttctgcgctcggcccttccggctggctggtttattgctgataaatctggagccggtgagcgtgggtctcgcggtatcattgcagcactggggccagatggtaagccctcccgtatcgtagttatctacacgacggggagtcaggcaactatggatgaacgaaatagacagatcgctgagataggtgcctcactgattaagcattggtaactgtcagaccaagtttactcatatatactttagattgatttaaaacttcatttttaatttaaaaggatctaggtgaagatcctttttgataatctcatgaccaaaatcccttaacgtgagttttcgttccactgagcgtcagaccccgtagaaaagatcaaaggatcttcttgagatcctttttttctgcgcgtaatctgctgcttgcaaacaaaaaaaccaccgctaccagcggtggtttgtttgccggatcaagagctaccaactctttttccgaaggtaactggcttcagcagagcgcagataccaaatactgttcttctagtgtagccgtagttaggccaccacttcaagaactctgtagcaccgcctacatacctcgctctgctaatcctgttaccagtggctgctgccagtggcgataagtcgtgtcttaccgggttggactcaagacgatagttaccggataaggcgcagcggtcgggctgaacggggggttcgtgcacacagcccagcttggagcgaacgacctacaccgaactgagatacctacagcgtgagctatgagaaagcgccacgcttcccgaagggagaaaggcggacaggtatccggtaagcggcagggtcggaacaggagagcgcacgagggagcttccagggggaaacgcctggtatctttatagtcctgtcgggtttcgccacctctgacttgagcgtcgatttttgtgatgctcgtcaggggggcggagcctatggaaaaacgccagcaacgcggcctttttacggttcctggccttttgctggccttttgctcacatgttctttcctgcgttatcccctgattctgtggataaccgtattaccgcctttgagtgagctgataccgctcgccgcagccgaacgaccgagcgcagcgagtcagtgagcgaggaagcggaagagcgcccaatacgcaaaccgcctctccccgcgcgttggccgattcattaatgcagctggcacgacaggtttcccgactggaaagcgggcagtgagcgcaacgcaattaatgtgagttagctcactcattaggcaccccaggctttacactttatgcttccggctcgtatgttgtgtggaattgtgagcggataacaatttcacacaggaaacagctatgaccatgattacgccaagcttgcatgcctgcaggcagctgcgcgctcgctcgctcactgaggccgcccgggcgtcgggcgacctttggtcgcccggcctcagtgagcgagcgagcgcgcagagagggagtggccaactccatcactaggggttcctggaggggtggagtcgtgacgtaaagatctgatatcatcgatcgcgatgcattaattaagcggccgaggctcagaggcacacaggagtttctgggctcaccctgcccccttccaacccctcagttcccatcctccagcagctgtttgtgtgctgcctctgaagtccacactgaacaaacttcagcctactcatgtccctaaaatgggcaaacattgcaagcagcaaacagcaaacacacagccctccctgcctgctgaccttggagctggggcagaggtcagagacctctctgggcccatgccacctccaacatccactcgaccccttggaatttcggtggagaggagcagaggttgtcctggcgtggtttaggtagtgtgagaggggtacccggggatcttgctaccagtggaacagccactaaggattctgcagtgagagcagagggccagctaagtggtactctcccagagactgtctgactcacgccaccccctccaccttggacacaggacgctgtggtttctgagccaggtacaatgactcctttcggtaagtgcagtggaagctgtacactgcccaggcaaagcgtccgggcagcgtaggcgggcgactcagatcccagccagtggacttagcccctgtttgctcctccgataactggggtgaccttggttaatattcaccagcagcctcccccgttgcccctctggatccactgcttaaatacggacgaggacagggccctgtctcctcagcttcaggcaccaccactgacctgggacagtgaatgatccccctgatctgcggcctcgacggtatcgataagcttgatatcgaattctagtcgtcgaccactttcacaatctgctagcaaaggttgccaccatgcagcgcgtgaacatgattatggccgagagccctggcctgatcaccatctgcctgctgggctacctgctgagcgccgagtgtacaggtttgtttccttttttaaaatacattgagtatgcttgccttttagatatagaaatatctgatgctgtcttcttcactaaattttgattacatgatttgacagcaatattgaagagtctaacagccagcacgcaggttggtaagtactggttctttgttagctaggttttcttcttcttcatttttaaaactaaatagatcgacaatgcttatgatgcatttatgtttaataaacactgttcagttcatgatttggtcatgtaattcctgttagaaaacattcatctccttggtttaaaaaaattaaaagtgggaaaacaaagaaatagcagaatatagtgaaaaaaaataaccacattatttttgtttggacttaccactttgaaatcaaaatgggaaacaaaagcacaaacaatggccttatttacacaaaaagtctgattttaagatatatgacatttcaaggtttcagaagtatgtaatgaggtgtgtctctaattttttaaattatatatcttcaatttaaagttttagttaaaacataaagattaacctttcattagcaagctgttagttatcaccaaagcttttcatggattaggaaaaaatcattttgtctctatgtcaaacatcttggagttgatatttggggaaacacaatactcagttgagttccctaggggagaaaagcaagcttaagaattgacataaagagtaggaagttagctaatgcaacatatatcactttgttttttcacaactacagtgactttatgtatttcccagaggaaggcatacagggaagaaattatcccatttggacaaacagcatgttctcacaggaagcatttatcacacttacttgtcaactttctagaatcaaatctagtagctgacagtaccaggatcaggggtgccaaccctaagcacccccagaaagctgactggccctgtggttcccactccagacatgatgtcagctgtgaaatcgacgtcgctggaccataattaggcttctgttcttcaggagacatttgttcaaagtcatttgggcaaccatattctgaaaacagcccagccagggtgatggatcactttgcaaagatcctcaatgagctattttcaagtgatgacaaagtgtgaagttaaccgctcatttgagaactttctttttcatccaaagtaaattcaaatatgattagaaatctgaccttttattactggaattctcttgactaaaagtaaaattgaattttaattcctaaatctccatgtgtatacagtactgtgggaacatcacagattttggctccatgccctaaagagaaattggctttcagattatttggattaaaaacaaagactttcttaagagatgtaaaattttcatgatgttttcttttttgctaaaactaaagaattattcttttacatttcagtgttcctggaccacgagaacgccaacaagatcctgaacagacccaagagatacaacagcggcaagctggaagagttcgtgcagggcaacctggaacgcgagtgcatggaagagaagtgcagcttcgaagaggccagagaggtgttcgagaacaccgagagaaccaccgagttctggaagcagtacgtggacggcgaccagtgcgagagcaacccttgtctgaacggcggcagctgcaaggacgacatcaacagctacgagtgctggtgccccttcggcttcgagggcaagaactgcgagctggacgtgacctgcaacatcaagaacggcagatgcgagcagttctgcaagaacagcgccgacaacaaggtcgtgtgctcctgcaccgagggctacagactggccgagaaccagaagtcctgcgagcccgctgtgcctttcccatgcggaagagtgtccgtgtcccagaccagcaagctgaccagagccgagacagtgttccccgacgtggactacgtgaacagcaccgaggccgagacaatcctggacaacatcacccagagcacccagtccttcaacgacttcaccagagtcgtgggcggcgaggatgctaagcctggccagttcccgtggcaggtggtgctgaacggaaaggtggacgccttctgcggcggctccatcgtgaacgagaagtggatcgtgacagccgcccactgcgtggaaaccggcgtgaagatcacagtggtggccggcgagcacaacatcgaggaaaccgagcacacagagcagaaaagaaacgtgatcaggatcatcccccaccacaactacaacgccgccatcaacaagtacaaccacgatatcgccctgctggaactggacgagcccctggtgctgaatagctacgtgacccccatctgtatcgccgacaaagagtacaccaacatctttctgaagttcggcagcggctacgtgtccggctggggcagagtgtttcacaagggcagatccgctctggtgctgcagtacctgagagtgcctctggtggacagagccacctgtctgctgagcaccaagttcaccatctacaacaacatgttctgcgctggcttccacgagggcggcagagactcttgtcagggcgattctggcggccctcacgtgacagaggtggaaggcaccagctttctgaccggcatcatcagctggggcgaggaatgcgccatgaaggggaagtacggcatctacaccaaggtgtccagatacgtgaactggatcaaagaaaagaccaagctgacataatgaaagatggatttccaaggttaattcattggaattgaaaattaacagccccccccccccccccctgcagatctcgagccgaattcctgcagcccgggggatcagcctcgactgtgccttctagttgccagccatctgttgtttgcccctcccccgtgccttccttgaccctggaaggtgccactcccactgtcctttcctaataaaatgaggaaattgcatcgcattgtctgagtaggtgtcattctattctggggggtggggtggggcaggacagcaagggggaggattgggaagacaatagcaggcatgctggggatgcggtgggctctatggcttctgaggcggaaagaaccagctggggctcgagatccactagactagtgtacacgcgtgatatcagatctgttacgtagataagtagcatggcgggttaatcattaactacaaggaacccctagtgatggagttggccactccctctctgcgcgctcgctcgctcactgaggccgggcgaccaaaggtcgcccgacgcccgggctttgcccgggcggcctcagtgagcgagcgagcgcgcagctgcctgcaggtcgactctagaggatccccgggtaccgagctcgaattcactggccgtcgttttacaacgtcgtgactgggaaaaccctggcgttacccaacttaatcgccttgcagcacatccccctttcgccagctggcgtaatagcgaagaggcccgcaccgatcgcccttcccaacagttgcgcagcctgaatggcgaatggcgcctgatgcggtattttctccttacgcatctgtgcggtatttcacaccgcatacgtcaaagcaaccatagtacgcgccctgtagcggcgcattaagcgcggcgggtgtggtggttacgcgcagcgtgaccgctacacttgccagcgcttagcgcccgctcctttcgctttcttcccttcctttctcgccacgttcgccggctttccccgtcaagctctaaatcgggggctccctttagggttccgatttagtgctttacggcacctcgaccccaaaaaacttgatttgggtgatggttcacgtagtgggccatcgccctgatagacggtttttcgccctttgacgttggagtccacgttctttaatagtggactcttgttccaaactggaacaacactcaactctatctcgggctattcttttgatttataagggattttgccgatttcggtctattggttaaaaaatgagctgatttaacaaaaatttaacgcgaattttaacaaaatattaacgtttacaattttatggtgcactctcagtacaatctgctctgatgccgcatagttaagccagccccgacacccgccaacacccgctgacgcgccctgacgggcttgtctgctcccggcatccgcttacagacaagctgtgaccgtctccgggagctgcatgtgtcagaggttttcaccgtcatcaccgaaacgcgcgagacgaaagggcctcgtgatacgcctatttttataggttaatgtcatgataataatggtttcttagacgtcaggtggcacttttcggggaaatgtgcgcggaacccctatttgtttatttttctaaatacattcaaatatgtatccgctcatgagacaataaccctgataaatgcttcaataatattgaaaaaggaagagtatgagtattcaacatttccgtgtcgcccttattcccttttttgcggcattttgccttcctgtttttgctcacccagaaacgctggtgaaagtaaaagatgctgaagatcagttgggtgcacgagtgggttacatcgaactggatctcaacagcggtaagatccttgagagttttcgccccgaagaacgttttccaatgatgagcacttttaaagttctgctatgtggcgcggtattatcccgtattgacgccgggcaagagcaactcggtcgccgcatacactattctcagaatgacttggttgagtactcaccagtcacagaaaagcatcttacggatggcatgacagtaagagaattatgcagtgctgccataaccatgagtgataacactgcggccaacttacttctgacaacgatcggaggaccgaaggagctaaccgcttttttgcacaacatgg

SEQ ID NO: 450 - DNA, 7585 bp, Artificial Sequence
  AAV-human WT-FIX vector
gggatcatgtaactcgccttgatcgttgggaaccggagctgaatgaagccataccaaacgacgagcgtgacaccacgatgcctgtagcaatggcaacaacgttgcgcaaactattaactggcgaactacttactctagcttcccggcaacaattaatagactggatggaggcggataaagttgcaggaccacttctgcgctcggcccttccggctggctggtttattgctgataaatctggagccggtgagcgtgggtctcgcggtatcattgcagcactggggccagatggtaagccctcccgtatcgtagttatctacacgacggggagtcaggcaactatggatgaacgaaatagacagatcgctgagataggtgcctcactgattaagcattggtaactgtcagaccaagtttactcatatatactttagattgatttaaaacttcatttttaatttaaaaggatctaggtgaagatcctttttgataatctcatgaccaaaatcccttaacgtgagttttcgttccactgagcgtcagaccccgtagaaaagatcaaaggatcttcttgagatcctttttttctgcgcgtaatctgctgcttgcaaacaaaaaaaccaccgctaccagcggtggtttgtttgccggatcaagagctaccaactctttttccgaaggtaactggcttcagcagagcgcagataccaaatactgttcttctagtgtagccgtagttaggccaccacttcaagaactctgtagcaccgcctacatacctcgctctgctaatcctgttaccagtggctgctgccagtggcgataagtcgtgtcttaccgggttggactcaagacgatagttaccggataaggcgcagcggtcgggctgaacggggggttcgtgcacacagcccagcttggagcgaacgacctacaccgaactgagatacctacagcgtgagctatgagaaagcgccacgcttcccgaagggagaaaggcggacaggtatccggtaagcggcagggtcggaacaggagagcgcacgagggagcttccagggggaaacgcctggtatctttatagtcctgtcgggtttcgccacctctgacttgagcgtcgatttttgtgatgctcgtcaggggggcggagcctatggaaaaacgccagcaacgcggcctttttacggttcctggccttttgctggccttttgctcacatgttctttcctgcgttatcccctgattctgtggataaccgtattaccgcctttgagtgagctgataccgctcgccgcagccgaacgaccgagcgcagcgagtcagtgagcgaggaagcggaagagcgcccaatacgcaaaccgcctctccccgcgcgttggccgattcattaatgcagctggcacgacaggtttcccgactggaaagcgggcagtgagcgcaacgcaattaatgtgagttagctcactcattaggcaccccaggctttacactttatgcttccggctcgtatgttgtgtggaattgtgagcggataacaatttcacacaggaaacagctatgaccatgattacgccaagcttgcatgcctgcaggcagctgcgcgctcgctcgctcactgaggccgcccgggcgtcgggcgacctttggtcgcccggcctcagtgagcgagcgagcgcgcagagagggagtggccaactccatcactaggggttcctggaggggtggagtcgtgacgtaaagatctgatatcatcgatcgcgatgcattaattaagcggccgaggctcagaggcacacaggagtttctgggctcaccctgcccccttccaacccctcagttcccatcctccagcagctgtttgtgtgctgcctctgaagtccacactgaacaaacttcagcctactcatgtccctaaaatgggcaaacattgcaagcagcaaacagcaaacacacagccctccctgcctgctgaccttggagctggggcagaggtcagagacctctctgggcccatgccacctccaacatccactcgaccccttggaatttcggtggagaggagcagaggttgtcctggcgtggtttaggtagtgtgagaggggtacccggggatcttgctaccagtggaacagccactaaggattctgcagtgagagcagagggccagctaagtggtactctcccagagactgtctgactcacgccaccccctccaccttggacacaggacgctgtggtttctgagccaggtacaatgactcctttcggtaagtgcagtggaagctgtacactgcccaggcaaagcgtccgggcagcgtaggcgggcgactcagatcccagccagtggacttagcccctgtttgctcctccgataactggggtgaccttggttaatattcaccagcagcctcccccgttgcccctctggatccactgcttaaatacggacgaggacagggccctgtctcctcagcttcaggcaccaccactgacctgggacagtgaatgatccccctgatctgcggcctcgacggtatcgataagcttgatatcgaattctagtcgtcgaccactttcacaatctgctagcaaaggttgccaccatgcagcgcgtgaacatgatcatggcagaatcaccaggcctcatcaccatctgccttttaggatatctactcagtgctgaatgtacaggtttgtttccttttttaaaatacattgagtatgcttgccttttagatatagaaatatctgatgctgtcttcttcactaaattttgattacatgatttgacagcaatattgaagagtctaacagccagcacgcaggttggtaagtactggttctttgttagctaggttttcttcttcttcatttttaaaactaaatagatcgacaatgcttatgatgcatttatgtttaataaacactgttcagttcatgatttggtcatgtaattcctgttagaaaacattcatctccttggtttaaaaaaattaaaagtgggaaaacaaagaaatagcagaatatagtgaaaaaaaataaccacattatttttgtttggacttaccactttgaaatcaaaatgggaaacaaaagcacaaacaatggccttatttacacaaaaagtctgattttaagatatatgacatttcaaggtttcagaagtatgtaatgaggtgtgtctctaattttttaaattatatatcttcaatttaaagttttagttaaaacataaagattaacctttcattagcaagctgttagttatcaccaaagcttttcatggattaggaaaaaatcattttgtctctatgtcaaacatcttggagttgatatttggggaaacacaatactcagttgagttccctaggggagaaaagcaagcttaagaattgacataaagagtaggaagttagctaatgcaacatatatcactttgttttttcacaactacagtgactttatgtatttcccagaggaaggcatacagggaagaaattatcccatttggacaaacagcatgttctcacaggaagcatttatcacacttacttgtcaactttctagaatcaaatctagtagctgacagtaccaggatcaggggtgccaaccctaagcacccccagaaagctgactggccctgtggttcccactccagacatgatgtcagctgtgaaatcgacgtcgctggaccataattaggcttctgttcttcaggagacatttgttcaaagtcatttgggcaaccatattctgaaaacagcccagccagggtgatggatcactttgcaaagatcctcaatgagctattttcaagtgatgacaaagtgtgaagttaaccgctcatttgagaactttctttttcatccaaagtaaattcaaatatgattagaaatctgaccttttattactggaattctcttgactaaaagtaaaattgaattttaattcctaaatctccatgtgtatacagtactgtgggaacatcacagattttggctccatgccctaaagagaaattggctttcagattatttggattaaaaacaaagactttcttaagagatgtaaaattttcatgatgttttcttttttgctaaaactaaagaattattcttttacatttcagtttttcttgatcatgaaaacgccaacaaaattctgaatcggccaaagaggtataattcaggtaaattggaagagtttgttcaagggaaccttgagagagaatgtatggaagaaaagtgtagttttgaagaagcacgagaagtttttgaaaacactgaaagaacaactgaattttggaagcagtatgttgatggagatcagtgtgagtccaatccatgtttaaatggcggcagttgcaaggatgacattaattcctatgaatgttggtgtccctttggatttgaaggaaagaactgtgaattagatgtaacatgtaacattaagaatggcagatgcgagcagttttgtaaaaatagtgctgataacaaggtggtttgctcctgtactgagggatatcgacttgcagaaaaccagaagtcctgtgaaccagcagtgccatttccatgtggaagagtttctgtttcacaaacttctaagctcacccgtgctgagactgtttttcctgatgtggactatgtaaattctactgaagctgaaaccattttggataacatcactcaaagcacccaatcatttaatgacttcactcgggttgttggtggagaagatgccaaaccaggtcaattcccttggcaggttgttttgaatggtaaagttgatgcattctgtggaggctctatcgttaatgaaaaatggattgtaactgctgcccactgtgttgaaactggtgttaaaattacagttgtcgcaggtgaacataatattgaggagacagaacatacagagcaaaagcgaaatgtgattcgaattattcctcaccacaactacaatgcagctattaataagtacaaccatgacattgcccttctggaactggacgaacccttagtgctaaacagctacgttacacctatttgcattgctgacaaggaatacacgaacatcttcctcaaatttggatctggctatgtaagtggctggggaagagtcttccacaaagggagatcagctttagttcttcagtaccttagagttccacttgttgaccgagccacatgtcttcgatctacaaagttcaccatctataacaacatgttctgtgctggcttccatgaaggaggtagagattcatgtcaaggagatagtgggggaccccatgttactgaagtggaagggaccagtttcttaactggaattattagctggggtgaagagtgtgcaatgaaaggcaaatatggaatatataccaaggtatcccggtatgtcaactggattaaggaaaaaacaaagctcacttaatgaaagatggatttccaaggttaattcattggaattgaaaattaacagccccccccccccccccctgcagatctcgagccgaattcctgcagcccgggggatcagcctcgactgtgccttctagttgccagccatctgttgtttgcccctcccccgtgccttccttgaccctggaaggtgccactcccactgtcctttcctaataaaatgaggaaattgcatcgcattgtctgagtaggtgtcattctattctggggggtggggtggggcaggacagcaagggggaggattgggaagacaatagcaggcatgctggggatgcggtgggctctatggcttctgaggcggaaagaaccagctggggctcgagatccactagactagtgtacacgcgtgatatcagatctgttacgtagataagtagcatggcgggttaatcattaactacaaggaacccctagtgatggagttggccactccctctctgcgcgctcgctcgctcactgaggccgggcgaccaaaggtcgcccgacgcccgggctttgcccgggcggcctcagtgagcgagcgagcgcgcagctgcctgcaggtcgactctagaggatccccgggtaccgagctcgaattcactggccgtcgttttacaacgtcgtgactgggaaaaccctggcgttacccaacttaatcgccttgcagcacatccccctttcgccagctggcgtaatagcgaagaggcccgcaccgatcgcccttcccaacagttgcgcagcctgaatggcgaatggcgcctgatgcggtattttctccttacgcatctgtgcggtatttcacaccgcatacgtcaaagcaaccatagtacgcgccctgtagcggcgcattaagcgcggcgggtgtggtggttacgcgcagcgtgaccgctacacttgccagcgcttagcgcccgctcctttcgctttcttcccttcctttctcgccacgttcgccggctttccccgtcaagctctaaatcgggggctccctttagggttccgatttagtgctttacggcacctcgaccccaaaaaacttgatttgggtgatggttcacgtagtgggccatcgccctgatagacggtttttcgccctttgacgttggagtccacgttctttaatagtggactcttgttccaaactggaacaacactcaactctatctcgggctattcttttgatttataagggattttgccgatttcggtctattggttaaaaaatgagctgatttaacaaaaatttaacgcgaattttaacaaaatattaacgtttacaattttatggtgcactctcagtacaatctgctctgatgccgcatagttaagccagccccgacacccgccaacacccgctgacgcgccctgacgggcttgtctgctcccggcatccgcttacagacaagctgtgaccgtctccgggagctgcatgtgtcagaggttttcaccgtcatcaccgaaacgcgcgagacgaaagggcctcgtgatacgcctatttttataggttaatgtcatgataataatggtttcttagacgtcaggtggcacttttcggggaaatgtgcgcggaacccctatttgtttatttttctaaatacattcaaatatgtatccgctcatgagacaataaccctgataaatgcttcaataatattgaaaaaggaagagtatgagtattcaacatttccgtgtcgcccttattcccttttttgcggcattttgccttcctgtttttgctcacccagaaacgctggtgaaagtaaaagatgctgaagatcagttgggtgcacgagtgggttacatcgaactggatctcaacagcggtaagatccttgagagttttcgccccgaagaacgttttccaatgatgagcacttttaaagttctgctatgtggcgcggtattatcccgtattgacgccgggcaagagcaactcggtcgccgcatacactattctcagaatgacttggttgagtactcaccagtcacagaaaagcatcttacggatggcatgacagtaagagaattatgcagtgctgccataaccatgagtgataacactgcggccaacttacttctgacaacgatcggaggaccgaaggagctaaccgcttttttgcacaacatgg

SEQ ID NO: 451 - DNA, 7585 bp, Artificial Sequence
  AAV-human FIX R318Y/R338E/T343R vector
gggatcatgtaactcgccttgatcgttgggaaccggagctgaatgaagccataccaaacgacgagcgtgacaccacgatgcctgtagcaatggcaacaacgttgcgcaaactattaactggcgaactacttactctagcttcccggcaacaattaatagactggatggaggcggataaagttgcaggaccacttctgcgctcggcccttccggctggctggtttattgctgataaatctggagccggtgagcgtgggtctcgcggtatcattgcagcactggggccagatggtaagccctcccgtatcgtagttatctacacgacggggagtcaggcaactatggatgaacgaaatagacagatcgctgagataggtgcctcactgattaagcattggtaactgtcagaccaagtttactcatatatactttagattgatttaaaacttcatttttaatttaaaaggatctaggtgaagatcctttttgataatctcatgaccaaaatcccttaacgtgagttttcgttccactgagcgtcagaccccgtagaaaagatcaaaggatcttcttgagatcctttttttctgcgcgtaatctgctgcttgcaaacaaaaaaaccaccgctaccagcggtggtttgtttgccggatcaagagctaccaactctttttccgaaggtaactggcttcagcagagcgcagataccaaatactgttcttctagtgtagccgtagttaggccaccacttcaagaactctgtagcaccgcctacatacctcgctctgctaatcctgttaccagtggctgctgccagtggcgataagtcgtgtcttaccgggttggactcaagacgatagttaccggataaggcgcagcggtcgggctgaacggggggttcgtgcacacagcccagcttggagcgaacgacctacaccgaactgagatacctacagcgtgagctatgagaaagcgccacgcttcccgaagggagaaaggcggacaggtatccggtaagcggcagggtcggaacaggagagcgcacgagggagcttccagggggaaacgcctggtatctttatagtcctgtcgggtttcgccacctctgacttgagcgtcgatttttgtgatgctcgtcaggggggcggagcctatggaaaaacgccagcaacgcggcctttttacggttcctggccttttgctggccttttgctcacatgttctttcctgcgttatcccctgattctgtggataaccgtattaccgcctttgagtgagctgataccgctcgccgcagccgaacgaccgagcgcagcgagtcagtgagcgaggaagcggaagagcgcccaatacgcaaaccgcctctccccgcgcgttggccgattcattaatgcagctggcacgacaggtttcccgactggaaagcgggcagtgagcgcaacgcaattaatgtgagttagctcactcattaggcaccccaggctttacactttatgcttccggctcgtatgttgtgtggaattgtgagcggataacaatttcacacaggaaacagctatgaccatgattacgccaagcttgcatgcctgcaggcagctgcgcgctcgctcgctcactgaggccgcccgggcgtcgggcgacctttggtcgcccggcctcagtgagcgagcgagcgcgcagagagggagtggccaactccatcactaggggttcctggaggggtggagtcgtgacgtaaagatctgatatcatcgatcgcgatgcattaattaagcggccgaggctcagaggcacacaggagtttctgggctcaccctgcccccttccaacccctcagttcccatcctccagcagctgtttgtgtgctgcctctgaagtccacactgaacaaacttcagcctactcatgtccctaaaatgggcaaacattgcaagcagcaaacagcaaacacacagccctccctgcctgctgaccttggagctggggcagaggtcagagacctctctgggcccatgccacctccaacatccactcgaccccttggaatttcggtggagaggagcagaggttgtcctggcgtggtttaggtagtgtgagaggggtacccggggatcttgctaccagtggaacagccactaaggattctgcagtgagagcagagggccagctaagtggtactctcccagagactgtctgactcacgccaccccctccaccttggacacaggacgctgtggtttctgagccaggtacaatgactcctttcggtaagtgcagtggaagctgtacactgcccaggcaaagcgtccgggcagcgtaggcgggcgactcagatcccagccagtggacttagcccctgtttgctcctccgataactggggtgaccttggttaatattcaccagcagcctcccccgttgcccctctggatccactgcttaaatacggacgaggacagggccctgtctcctcagcttcaggcaccaccactgacctgggacagtgaatgatccccctgatctgcggcctcgacggtatcgataagcttgatatcgaattctagtcgtcgaccactttcacaatctgctagcaaaggttgccaccatgcagcgcgtgaacatgatcatggcagaatcaccaggcctcatcaccatctgccttttaggatatctactcagtgctgaatgtacaggtttgtttccttttttaaaatacattgagtatgcttgccttttagatatagaaatatctgatgctgtcttcttcactaaattttgattacatgatttgacagcaatattgaagagtctaacagccagcacgcaggttggtaagtactggttctttgttagctaggttttcttcttcttcatttttaaaactaaatagatcgacaatgcttatgatgcatttatgtttaataaacactgttcagttcatgatttggtcatgtaattcctgttagaaaacattcatctccttggtttaaaaaaattaaaagtgggaaaacaaagaaatagcagaatatagtgaaaaaaaataaccacattatttttgtttggacttaccactttgaaatcaaaatgggaaacaaaagcacaaacaatggccttatttacacaaaaagtctgattttaagatatatgacatttcaaggtttcagaagtatgtaatgaggtgtgtctctaattttttaaattatatatcttcaatttaaagttttagttaaaacataaagattaacctttcattagcaagctgttagttatcaccaaagcttttcatggattaggaaaaaatcattttgtctctatgtcaaacatcttggagttgatatttggggaaacacaatactcagttgagttccctaggggagaaaagcaagcttaagaattgacataaagagtaggaagttagctaatgcaacatatatcactttgttttttcacaactacagtgactttatgtatttcccagaggaaggcatacagggaagaaattatcccatttggacaaacagcatgttctcacaggaagcatttatcacacttacttgtcaactttctagaatcaaatctagtagctgacagtaccaggatcaggggtgccaaccctaagcacccccagaaagctgactggccctgtggttcccactccagacatgatgtcagctgtgaaatcgacgtcgctggaccataattaggcttctgttcttcaggagacatttgttcaaagtcatttgggcaaccatattctgaaaacagcccagccagggtgatggatcactttgcaaagatcctcaatgagctattttcaagtgatgacaaagtgtgaagttaaccgctcatttgagaactttctttttcatccaaagtaaattcaaatatgattagaaatctgaccttttattactggaattctcttgactaaaagtaaaattgaattttaattcctaaatctccatgtgtatacagtactgtgggaacatcacagattttggctccatgccctaaagagaaattggctttcagattatttggattaaaaacaaagactttcttaagagatgtaaaattttcatgatgttttcttttttgctaaaactaaagaattattcttttacatttcagtttttcttgatcatgaaaacgccaacaaaattctgaatcggccaaagaggtataattcaggtaaattggaagagtttgttcaagggaaccttgagagagaatgtatggaagaaaagtgtagttttgaagaagcacgagaagtttttgaaaacactgaaagaacaactgaattttggaagcagtatgttgatggagatcagtgtgagtccaatccatgtttaaatggcggcagttgcaaggatgacattaattcctatgaatgttggtgtccctttggatttgaaggaaagaactgtgaattagatgtaacatgtaacattaagaatggcagatgcgagcagttttgtaaaaatagtgctgataacaaggtggtttgctcctgtactgagggatatcgacttgcagaaaaccagaagtcctgtgaaccagcagtgccatttccatgtggaagagtttctgtttcacaaacttctaagctcacccgtgctgagactgtttttcctgatgtggactatgtaaattctactgaagctgaaaccattttggataacatcactcaaagcacccaatcatttaatgacttcactcgggttgttggtggagaagatgccaaaccaggtcaattcccttggcaggttgttttgaatggtaaagttgatgcattctgtggaggctctatcgttaatgaaaaatggattgtaactgctgcccactgtgttgaaactggtgttaaaattacagttgtcgcaggtgaacataatattgaggagacagaacatacagagcaaaagcgaaatgtgattcgaattattcctcaccacaactacaatgcagctattaataagtacaaccatgacattgcccttctggaactggacgaacccttagtgctaaacagctacgttacacctatttgcattgctgacaaggaatacacgaacatcttcctcaaatttggatctggctatgtaagtggctggggaagagtcttccacaaagggtactcagctttagttcttcagtaccttagagttccacttgttgaccgagccacatgtcttgaatctacaaagttcaggatctataacaacatgttctgtgctggcttccatgaaggaggtagagattcatgtcaaggagatagtgggggaccccatgttactgaagtggaagggaccagtttcttaactggaattattagctggggtgaagagtgtgcaatgaaaggcaaatatggaatatataccaaggtatcccggtatgtcaactggattaaggaaaaaacaaagctcacttaatgaaagatggatttccaaggttaattcattggaattgaaaattaacagccccccccccccccccctgcagatctcgagccgaattcctgcagcccgggggatcagcctcgactgtgccttctagttgccagccatctgttgtttgcccctcccccgtgccttccttgaccctggaaggtgccactcccactgtcctttcctaataaaatgaggaaattgcatcgcattgtctgagtaggtgtcattctattctggggggtggggtggggcaggacagcaagggggaggattgggaagacaatagcaggcatgctggggatgcggtgggctctatggcttctgaggcggaaagaaccagctggggctcgagatccactagactagtgtacacgcgtgatatcagatctgttacgtagataagtagcatggcgggttaatcattaactacaaggaacccctagtgatggagttggccactccctctctgcgcgctcgctcgctcactgaggccgggcgaccaaaggtcgcccgacgcccgggctttgcccgggcggcctcagtgagcgagcgagcgcgcagctgcctgcaggtcgactctagaggatccccgggtaccgagctcgaattcactggccgtcgttttacaacgtcgtgactgggaaaaccctggcgttacccaacttaatcgccttgcagcacatccccctttcgccagctggcgtaatagcgaagaggcccgcaccgatcgcccttcccaacagttgcgcagcctgaatggcgaatggcgcctgatgcggtattttctccttacgcatctgtgcggtatttcacaccgcatacgtcaaagcaaccatagtacgcgccctgtagcggcgcattaagcgcggcgggtgtggtggttacgcgcagcgtgaccgctacacttgccagcgcttagcgcccgctcctttcgctttcttcccttcctttctcgccacgttcgccggctttccccgtcaagctctaaatcgggggctccctttagggttccgatttagtgctttacggcacctcgaccccaaaaaacttgatttgggtgatggttcacgtagtgggccatcgccctgatagacggtttttcgccctttgacgttggagtccacgttctttaatagtggactcttgttccaaactggaacaacactcaactctatctcgggctattcttttgatttataagggattttgccgatttcggtctattggttaaaaaatgagctgatttaacaaaaatttaacgcgaattttaacaaaatattaacgtttacaattttatggtgcactctcagtacaatctgctctgatgccgcatagttaagccagccccgacacccgccaacacccgctgacgcgccctgacgggcttgtctgctcccggcatccgcttacagacaagctgtgaccgtctccgggagctgcatgtgtcagaggttttcaccgtcatcaccgaaacgcgcgagacgaaagggcctcgtgatacgcctatttttataggttaatgtcatgataataatggtttcttagacgtcaggtggcacttttcggggaaatgtgcgcggaacccctatttgtttatttttctaaatacattcaaatatgtatccgctcatgagacaataaccctgataaatgcttcaataatattgaaaaaggaagagtatgagtattcaacatttccgtgtcgcccttattcccttttttgcggcattttgccttcctgtttttgctcacccagaaacgctggtgaaagtaaaagatgctgaagatcagttgggtgcacgagtgggttacatcgaactggatctcaacagcggtaagatccttgagagttttcgccccgaagaacgttttccaatgatgagcacttttaaagttctgctatgtggcgcggtattatcccgtattgacgccgggcaagagcaactcggtcgccgcatacactattctcagaatgacttggttgagtactcaccagtcacagaaaagcatcttacggatggcatgacagtaagagaattatgcagtgctgccataaccatgagtgataacactgcggccaacttacttctgacaacgatcggaggaccgaaggagctaaccgcttttttgcacaacatgg

SEQ ID NO: 452 - DNA, 7585 bp, Artificial Sequence
  AAV-human FIX R338L vector
gggatcatgtaactcgccttgatcgttgggaaccggagctgaatgaagccataccaaacgacgagcgtgacaccacgatgcctgtagcaatggcaacaacgttgcgcaaactattaactggcgaactacttactctagcttcccggcaacaattaatagactggatggaggcggataaagttgcaggaccacttctgcgctcggcccttccggctggctggtttattgctgataaatctggagccggtgagcgtgggtctcgcggtatcattgcagcactggggccagatggtaagccctcccgtatcgtagttatctacacgacggggagtcaggcaactatggatgaacgaaatagacagatcgctgagataggtgcctcactgattaagcattggtaactgtcagaccaagtttactcatatatactttagattgatttaaaacttcatttttaatttaaaaggatctaggtgaagatcctttttgataatctcatgaccaaaatcccttaacgtgagttttcgttccactgagcgtcagaccccgtagaaaagatcaaaggatcttcttgagatcctttttttctgcgcgtaatctgctgcttgcaaacaaaaaaaccaccgctaccagcggtggtttgtttgccggatcaagagctaccaactctttttccgaaggtaactggcttcagcagagcgcagataccaaatactgttcttctagtgtagccgtagttaggccaccacttcaagaactctgtagcaccgcctacatacctcgctctgctaatcctgttaccagtggctgctgccagtggcgataagtcgtgtcttaccgggttggactcaagacgatagttaccggataaggcgcagcggtcgggctgaacggggggttcgtgcacacagcccagcttggagcgaacgacctacaccgaactgagatacctacagcgtgagctatgagaaagcgccacgcttcccgaagggagaaaggcggacaggtatccggtaagcggcagggtcggaacaggagagcgcacgagggagcttccagggggaaacgcctggtatctttatagtcctgtcgggtttcgccacctctgacttgagcgtcgatttttgtgatgctcgtcaggggggcggagcctatggaaaaacgccagcaacgcggcctttttacggttcctggccttttgctggccttttgctcacatgttctttcctgcgttatcccctgattctgtggataaccgtattaccgcctttgagtgagctgataccgctcgccgcagccgaacgaccgagcgcagcgagtcagtgagcgaggaagcggaagagcgcccaatacgcaaaccgcctctccccgcgcgttggccgattcattaatgcagctggcacgacaggtttcccgactggaaagcgggcagtgagcgcaacgcaattaatgtgagttagctcactcattaggcaccccaggctttacactttatgcttccggctcgtatgttgtgtggaattgtgagcggataacaatttcacacaggaaacagctatgaccatgattacgccaagcttgcatgcctgcaggcagctgcgcgctcgctcgctcactgaggccgcccgggcgtcgggcgacctttggtcgcccggcctcagtgagcgagcgagcgcgcagagagggagtggccaactccatcactaggggttcctggaggggtggagtcgtgacgtaaagatctgatatcatcgatcgcgatgcattaattaagcggccgaggctcagaggcacacaggagtttctgggctcaccctgcccccttccaacccctcagttcccatcctccagcagctgtttgtgtgctgcctctgaagtccacactgaacaaacttcagcctactcatgtccctaaaatgggcaaacattgcaagcagcaaacagcaaacacacagccctccctgcctgctgaccttggagctggggcagaggtcagagacctctctgggcccatgccacctccaacatccactcgaccccttggaatttcggtggagaggagcagaggttgtcctggcgtggtttaggtagtgtgagaggggtacccggggatcttgctaccagtggaacagccactaaggattctgcagtgagagcagagggccagctaagtggtactctcccagagactgtctgactcacgccaccccctccaccttggacacaggacgctgtggtttctgagccaggtacaatgactcctttcggtaagtgcagtggaagctgtacactgcccaggcaaagcgtccgggcagcgtaggcgggcgactcagatcccagccagtggacttagcccctgtttgctcctccgataactggggtgaccttggttaatattcaccagcagcctcccccgttgcccctctggatccactgcttaaatacggacgaggacagggccctgtctcctcagcttcaggcaccaccactgacctgggacagtgaatgatccccctgatctgcggcctcgacggtatcgataagcttgatatcgaattctagtcgtcgaccactttcacaatctgctagcaaaggttgccaccatgcagcgcgtgaacatgatcatggcagaatcaccaggcctcatcaccatctgccttttaggatatctactcagtgctgaatgtacaggtttgtttccttttttaaaatacattgagtatgcttgccttttagatatagaaatatctgatgctgtcttcttcactaaattttgattacatgatttgacagcaatattgaagagtctaacagccagcacgcaggttggtaagtactggttctttgttagctaggttttcttcttcttcatttttaaaactaaatagatcgacaatgcttatgatgcatttatgtttaataaacactgttcagttcatgatttggtcatgtaattcctgttagaaaacattcatctccttggtttaaaaaaattaaaagtgggaaaacaaagaaatagcagaatatagtgaaaaaaaataaccacattatttttgtttggacttaccactttgaaatcaaaatgggaaacaaaagcacaaacaatggccttatttacacaaaaagtctgattttaagatatatgacatttcaaggtttcagaagtatgtaatgaggtgtgtctctaattttttaaattatatatcttcaatttaaagttttagttaaaacataaagattaacctttcattagcaagctgttagttatcaccaaagcttttcatggattaggaaaaaatcattttgtctctatgtcaaacatcttggagttgatatttggggaaacacaatactcagttgagttccctaggggagaaaagcaagcttaagaattgacataaagagtaggaagttagctaatgcaacatatatcactttgttttttcacaactacagtgactttatgtatttcccagaggaaggcatacagggaagaaattatcccatttggacaaacagcatgttctcacaggaagcatttatcacacttacttgtcaactttctagaatcaaatctagtagctgacagtaccaggatcaggggtgccaaccctaagcacccccagaaagctgactggccctgtggttcccactccagacatgatgtcagctgtgaaatcgacgtcgctggaccataattaggcttctgttcttcaggagacatttgttcaaagtcatttgggcaaccatattctgaaaacagcccagccagggtgatggatcactttgcaaagatcctcaatgagctattttcaagtgatgacaaagtgtgaagttaaccgctcatttgagaactttctttttcatccaaagtaaattcaaatatgattagaaatctgaccttttattactggaattctcttgactaaaagtaaaattgaattttaattcctaaatctccatgtgtatacagtactgtgggaacatcacagattttggctccatgccctaaagagaaattggctttcagattatttggattaaaaacaaagactttcttaagagatgtaaaattttcatgatgttttcttttttgctaaaactaaagaattattcttttacatttcagtttttcttgatcatgaaaacgccaacaaaattctgaatcggccaaagaggtataattcaggtaaattggaagagtttgttcaagggaaccttgagagagaatgtatggaagaaaagtgtagttttgaagaagcacgagaagtttttgaaaacactgaaagaacaactgaattttggaagcagtatgttgatggagatcagtgtgagtccaatccatgtttaaatggcggcagttgcaaggatgacattaattcctatgaatgttggtgtccctttggatttgaaggaaagaactgtgaattagatgtaacatgtaacattaagaatggcagatgcgagcagttttgtaaaaatagtgctgataacaaggtggtttgctcctgtactgagggatatcgacttgcagaaaaccagaagtcctgtgaaccagcagtgccatttccatgtggaagagtttctgtttcacaaacttctaagctcacccgtgctgagactgtttttcctgatgtggactatgtaaattctactgaagctgaaaccattttggataacatcactcaaagcacccaatcatttaatgacttcactcgggttgttggtggagaagatgccaaaccaggtcaattcccttggcaggttgttttgaatggtaaagttgatgcattctgtggaggctctatcgttaatgaaaaatggattgtaactgctgcccactgtgttgaaactggtgttaaaattacagttgtcgcaggtgaacataatattgaggagacagaacatacagagcaaaagcgaaatgtgattcgaattattcctcaccacaactacaatgcagctattaataagtacaaccatgacattgcccttctggaactggacgaacccttagtgctaaacagctacgttacacctatttgcattgctgacaaggaatacacgaacatcttcctcaaatttggatctggctatgtaagtggctggggaagagtcttccacaaagggagatcagctttagttcttcagtaccttagagttccacttgttgaccgagccacatgtcttctgtctacaaagttcaccatctataacaacatgttctgtgctggcttccatgaaggaggtagagattcatgtcaaggagatagtgggggaccccatgttactgaagtggaagggaccagtttcttaactggaattattagctggggtgaagagtgtgcaatgaaaggcaaatatggaatatataccaaggtatcccggtatgtcaactggattaaggaaaaaacaaagctcacttaatgaaagatggatttccaaggttaattcattggaattgaaaattaacagccccccccccccccccctgcagatctcgagccgaattcctgcagcccgggggatcagcctcgactgtgccttctagttgccagccatctgttgtttgcccctcccccgtgccttccttgaccctggaaggtgccactcccactgtcctttcctaataaaatgaggaaattgcatcgcattgtctgagtaggtgtcattctattctggggggtggggtggggcaggacagcaagggggaggattgggaagacaatagcaggcatgctggggatgcggtgggctctatggcttctgaggcggaaagaaccagctggggctcgagatccactagactagtgtacacgcgtgatatcagatctgttacgtagataagtagcatggcgggttaatcattaactacaaggaacccctagtgatggagttggccactccctctctgcgcgctcgctcgctcactgaggccgggcgaccaaaggtcgcccgacgcccgggctttgcccgggcggcctcagtgagcgagcgagcgcgcagctgcctgcaggtcgactctagaggatccccgggtaccgagctcgaattcactggccgtcgttttacaacgtcgtgactgggaaaaccctggcgttacccaacttaatcgccttgcagcacatccccctttcgccagctggcgtaatagcgaagaggcccgcaccgatcgcccttcccaacagttgcgcagcctgaatggcgaatggcgcctgatgcggtattttctccttacgcatctgtgcggtatttcacaccgcatacgtcaaagcaaccatagtacgcgccctgtagcggcgcattaagcgcggcgggtgtggtggttacgcgcagcgtgaccgctacacttgccagcgcttagcgcccgctcctttcgctttcttcccttcctttctcgccacgttcgccggctttccccgtcaagctctaaatcgggggctccctttagggttccgatttagtgctttacggcacctcgaccccaaaaaacttgatttgggtgatggttcacgtagtgggccatcgccctgatagacggtttttcgccctttgacgttggagtccacgttctttaatagtggactcttgttccaaactggaacaacactcaactctatctcgggctattcttttgatttataagggattttgccgatttcggtctattggttaaaaaatgagctgatttaacaaaaatttaacgcgaattttaacaaaatattaacgtttacaattttatggtgcactctcagtacaatctgctctgatgccgcatagttaagccagccccgacacccgccaacacccgctgacgcgccctgacgggcttgtctgctcccggcatccgcttacagacaagctgtgaccgtctccgggagctgcatgtgtcagaggttttcaccgtcatcaccgaaacgcgcgagacgaaagggcctcgtgatacgcctatttttataggttaatgtcatgataataatggtttcttagacgtcaggtggcacttttcggggaaatgtgcgcggaacccctatttgtttatttttctaaatacattcaaatatgtatccgctcatgagacaataaccctgataaatgcttcaataatattgaaaaaggaagagtatgagtattcaacatttccgtgtcgcccttattcccttttttgcggcattttgccttcctgtttttgctcacccagaaacgctggtgaaagtaaaagatgctgaagatcagttgggtgcacgagtgggttacatcgaactggatctcaacagcggtaagatccttgagagttttcgccccgaagaacgttttccaatgatgagcacttttaaagttctgctatgtggcgcggtattatcccgtattgacgccgggcaagagcaactcggtcgccgcatacactattctcagaatgacttggttgagtactcaccagtcacagaaaagcatcttacggatggcatgacagtaagagaattatgcagtgctgccataaccatgagtgataacactgcggccaacttacttctgacaacgatcggaggaccgaaggagctaaccgcttttttgcacaacatgg

SEQ ID NO: 453 - DNA, 7585 bp, Artificial Sequence
  AAV-human FIX T148A vector
gggatcatgtaactcgccttgatcgttgggaaccggagctgaatgaagccataccaaacgacgagcgtgacaccacgatgcctgtagcaatggcaacaacgttgcgcaaactattaactggcgaactacttactctagcttcccggcaacaattaatagactggatggaggcggataaagttgcaggaccacttctgcgctcggcccttccggctggctggtttattgctgataaatctggagccggtgagcgtgggtctcgcggtatcattgcagcactggggccagatggtaagccctcccgtatcgtagttatctacacgacggggagtcaggcaactatggatgaacgaaatagacagatcgctgagataggtgcctcactgattaagcattggtaactgtcagaccaagtttactcatatatactttagattgatttaaaacttcatttttaatttaaaaggatctaggtgaagatcctttttgataatctcatgaccaaaatcccttaacgtgagttttcgttccactgagcgtcagaccccgtagaaaagatcaaaggatcttcttgagatcctttttttctgcgcgtaatctgctgcttgcaaacaaaaaaaccaccgctaccagcggtggtttgtttgccggatcaagagctaccaactctttttccgaaggtaactggcttcagcagagcgcagataccaaatactgttcttctagtgtagccgtagttaggccaccacttcaagaactctgtagcaccgcctacatacctcgctctgctaatcctgttaccagtggctgctgccagtggcgataagtcgtgtcttaccgggttggactcaagacgatagttaccggataaggcgcagcggtcgggctgaacggggggttcgtgcacacagcccagcttggagcgaacgacctacaccgaactgagatacctacagcgtgagctatgagaaagcgccacgcttcccgaagggagaaaggcggacaggtatccggtaagcggcagggtcggaacaggagagcgcacgagggagcttccagggggaaacgcctggtatctttatagtcctgtcgggtttcgccacctctgacttgagcgtcgatttttgtgatgctcgtcaggggggcggagcctatggaaaaacgccagcaacgcggcctttttacggttcctggccttttgctggccttttgctcacatgttctttcctgcgttatcccctgattctgtggataaccgtattaccgcctttgagtgagctgataccgctcgccgcagccgaacgaccgagcgcagcgagtcagtgagcgaggaagcggaagagcgcccaatacgcaaaccgcctctccccgcgcgttggccgattcattaatgcagctggcacgacaggtttcccgactggaaagcgggcagtgagcgcaacgcaattaatgtgagttagctcactcattaggcaccccaggctttacactttatgcttccggctcgtatgttgtgtggaattgtgagcggataacaatttcacacaggaaacagctatgaccatgattacgccaagcttgcatgcctgcaggcagctgcgcgctcgctcgctcactgaggccgcccgggcgtcgggcgacctttggtcgcccggcctcagtgagcgagcgagcgcgcagagagggagtggccaactccatcactaggggttcctggaggggtggagtcgtgacgtaaagatctgatatcatcgatcgcgatgcattaattaagcggccgaggctcagaggcacacaggagtttctgggctcaccctgcccccttccaacccctcagttcccatcctccagcagctgtttgtgtgctgcctctgaagtccacactgaacaaacttcagcctactcatgtccctaaaatgggcaaacattgcaagcagcaaacagcaaacacacagccctccctgcctgctgaccttggagctggggcagaggtcagagacctctctgggcccatgccacctccaacatccactcgaccccttggaatttcggtggagaggagcagaggttgtcctggcgtggtttaggtagtgtgagaggggtacccggggatcttgctaccagtggaacagccactaaggattctgcagtgagagcagagggccagctaagtggtactctcccagagactgtctgactcacgccaccccctccaccttggacacaggacgctgtggtttctgagccaggtacaatgactcctttcggtaagtgcagtggaagctgtacactgcccaggcaaagcgtccgggcagcgtaggcgggcgactcagatcccagccagtggacttagcccctgtttgctcctccgataactggggtgaccttggttaatattcaccagcagcctcccccgttgcccctctggatccactgcttaaatacggacgaggacagggccctgtctcctcagcttcaggcaccaccactgacctgggacagtgaatgatccccctgatctgcggcctcgacggtatcgataagcttgatatcgaattctagtcgtcgaccactttcacaatctgctagcaaaggttgccaccatgcagcgcgtgaacatgatcatggcagaatcaccaggcctcatcaccatctgccttttaggatatctactcagtgctgaatgtacaggtttgtttccttttttaaaatacattgagtatgcttgccttttagatatagaaatatctgatgctgtcttcttcactaaattttgattacatgatttgacagcaatattgaagagtctaacagccagcacgcaggttggtaagtactggttctttgttagctaggttttcttcttcttcatttttaaaactaaatagatcgacaatgcttatgatgcatttatgtttaataaacactgttcagttcatgatttggtcatgtaattcctgttagaaaacattcatctccttggtttaaaaaaattaaaagtgggaaaacaaagaaatagcagaatatagtgaaaaaaaataaccacattatttttgtttggacttaccactttgaaatcaaaatgggaaacaaaagcacaaacaatggccttatttacacaaaaagtctgattttaagatatatgacatttcaaggtttcagaagtatgtaatgaggtgtgtctctaattttttaaattatatatcttcaatttaaagttttagttaaaacataaagattaacctttcattagcaagctgttagttatcaccaaagcttttcatggattaggaaaaaatcattttgtctctatgtcaaacatcttggagttgatatttggggaaacacaatactcagttgagttccctaggggagaaaagcaagcttaagaattgacataaagagtaggaagttagctaatgcaacatatatcactttgttttttcacaactacagtgactttatgtatttcccagaggaaggcatacagggaagaaattatcccatttggacaaacagcatgttctcacaggaagcatttatcacacttacttgtcaactttctagaatcaaatctagtagctgacagtaccaggatcaggggtgccaaccctaagcacccccagaaagctgactggccctgtggttcccactccagacatgatgtcagctgtgaaatcgacgtcgctggaccataattaggcttctgttcttcaggagacatttgttcaaagtcatttgggcaaccatattctgaaaacagcccagccagggtgatggatcactttgcaaagatcctcaatgagctattttcaagtgatgacaaagtgtgaagttaaccgctcatttgagaactttctttttcatccaaagtaaattcaaatatgattagaaatctgaccttttattactggaattctcttgactaaaagtaaaattgaattttaattcctaaatctccatgtgtatacagtactgtgggaacatcacagattttggctccatgccctaaagagaaattggctttcagattatttggattaaaaacaaagactttcttaagagatgtaaaattttcatgatgttttcttttttgctaaaactaaagaattattcttttacatttcagtttttcttgatcatgaaaacgccaacaaaattctgaatcggccaaagaggtataattcaggtaaattggaagagtttgttcaagggaaccttgagagagaatgtatggaagaaaagtgtagttttgaagaagcacgagaagtttttgaaaacactgaaagaacaactgaattttggaagcagtatgttgatggagatcagtgtgagtccaatccatgtttaaatggcggcagttgcaaggatgacattaattcctatgaatgttggtgtccctttggatttgaaggaaagaactgtgaattagatgtaacatgtaacattaagaatggcagatgcgagcagttttgtaaaaatagtgctgataacaaggtggtttgctcctgtactgagggatatcgacttgcagaaaaccagaagtcctgtgaaccagcagtgccatttccatgtggaagagtttctgtttcacaaacttctaagctcacccgtgctgaggctgtttttcctgatgtggactatgtaaattctactgaagctgaaaccattttggataacatcactcaaagcacccaatcatttaatgacttcactcgggttgttggtggagaagatgccaaaccaggtcaattcccttggcaggttgttttgaatggtaaagttgatgcattctgtggaggctctatcgttaatgaaaaatggattgtaactgctgcccactgtgttgaaactggtgttaaaattacagttgtcgcaggtgaacataatattgaggagacagaacatacagagcaaaagcgaaatgtgattcgaattattcctcaccacaactacaatgcagctattaataagtacaaccatgacattgcccttctggaactggacgaacccttagtgctaaacagctacgttacacctatttgcattgctgacaaggaatacacgaacatcttcctcaaatttggatctggctatgtaagtggctggggaagagtcttccacaaagggagatcagctttagttcttcagtaccttagagttccacttgttgaccgagccacatgtcttcgatctacaaagttcaccatctataacaacatgttctgtgctggcttccatgaaggaggtagagattcatgtcaaggagatagtgggggaccccatgttactgaagtggaagggaccagtttcttaactggaattattagctggggtgaagagtgtgcaatgaaaggcaaatatggaatatataccaaggtatcccggtatgtcaactggattaaggaaaaaacaaagctcacttaatgaaagatggatttccaaggttaattcattggaattgaaaattaacagccccccccccccccccctgcagatctcgagccgaattcctgcagcccgggggatcagcctcgactgtgccttctagttgccagccatctgttgtttgcccctcccccgtgccttccttgaccctggaaggtgccactcccactgtcctttcctaataaaatgaggaaattgcatcgcattgtctgagtaggtgtcattctattctggggggtggggtggggcaggacagcaagggggaggattgggaagacaatagcaggcatgctggggatgcggtgggctctatggcttctgaggcggaaagaaccagctggggctcgagatccactagactagtgtacacgcgtgatatcagatctgttacgtagataagtagcatggcgggttaatcattaactacaaggaacccctagtgatggagttggccactccctctctgcgcgctcgctcgctcactgaggccgggcgaccaaaggtcgcccgacgcccgggctttgcccgggcggcctcagtgagcgagcgagcgcgcagctgcctgcaggtcgactctagaggatccccgggtaccgagctcgaattcactggccgtcgttttacaacgtcgtgactgggaaaaccctggcgttacccaacttaatcgccttgcagcacatccccctttcgccagctggcgtaatagcgaagaggcccgcaccgatcgcccttcccaacagttgcgcagcctgaatggcgaatggcgcctgatgcggtattttctccttacgcatctgtgcggtatttcacaccgcatacgtcaaagcaaccatagtacgcgccctgtagcggcgcattaagcgcggcgggtgtggtggttacgcgcagcgtgaccgctacacttgccagcgcttagcgcccgctcctttcgctttcttcccttcctttctcgccacgttcgccggctttccccgtcaagctctaaatcgggggctccctttagggttccgatttagtgctttacggcacctcgaccccaaaaaacttgatttgggtgatggttcacgtagtgggccatcgccctgatagacggtttttcgccctttgacgttggagtccacgttctttaatagtggactcttgttccaaactggaacaacactcaactctatctcgggctattcttttgatttataagggattttgccgatttcggtctattggttaaaaaatgagctgatttaacaaaaatttaacgcgaattttaacaaaatattaacgtttacaattttatggtgcactctcagtacaatctgctctgatgccgcatagttaagccagccccgacacccgccaacacccgctgacgcgccctgacgggcttgtctgctcccggcatccgcttacagacaagctgtgaccgtctccgggagctgcatgtgtcagaggttttcaccgtcatcaccgaaacgcgcgagacgaaagggcctcgtgatacgcctatttttataggttaatgtcatgataataatggtttcttagacgtcaggtggcacttttcggggaaatgtgcgcggaacccctatttgtttatttttctaaatacattcaaatatgtatccgctcatgagacaataaccctgataaatgcttcaataatattgaaaaaggaagagtatgagtattcaacatttccgtgtcgcccttattcccttttttgcggcattttgccttcctgtttttgctcacccagaaacgctggtgaaagtaaaagatgctgaagatcagttgggtgcacgagtgggttacatcgaactggatctcaacagcggtaagatccttgagagttttcgccccgaagaacgttttccaatgatgagcacttttaaagttctgctatgtggcgcggtattatcccgtattgacgccgggcaagagcaactcggtcgccgcatacactattctcagaatgacttggttgagtactcaccagtcacagaaaagcatcttacggatggcatgacagtaagagaattatgcagtgctgccataaccatgagtgataacactgcggccaacttacttctgacaacgatcggaggaccgaaggagctaaccgcttttttgcacaacatgg

SEQ ID NO: 454 - DNA, 7585 bp, Artificial Sequence
  AAV-human FIX T148A/R318Y/R338E/T343R vector
gggatcatgtaactcgccttgatcgttgggaaccggagctgaatgaagccataccaaacgacgagcgtgacaccacgatgcctgtagcaatggcaacaacgttgcgcaaactattaactggcgaactacttactctagcttcccggcaacaattaatagactggatggaggcggataaagttgcaggaccacttctgcgctcggcccttccggctggctggtttattgctgataaatctggagccggtgagcgtgggtctcgcggtatcattgcagcactggggccagatggtaagccctcccgtatcgtagttatctacacgacggggagtcaggcaactatggatgaacgaaatagacagatcgctgagataggtgcctcactgattaagcattggtaactgtcagaccaagtttactcatatatactttagattgatttaaaacttcatttttaatttaaaaggatctaggtgaagatcctttttgataatctcatgaccaaaatcccttaacgtgagttttcgttccactgagcgtcagaccccgtagaaaagatcaaaggatcttcttgagatcctttttttctgcgcgtaatctgctgcttgcaaacaaaaaaaccaccgctaccagcggtggtttgtttgccggatcaagagctaccaactctttttccgaaggtaactggcttcagcagagcgcagataccaaatactgttcttctagtgtagccgtagttaggccaccacttcaagaactctgtagcaccgcctacatacctcgctctgctaatcctgttaccagtggctgctgccagtggcgataagtcgtgtcttaccgggttggactcaagacgatagttaccggataaggcgcagcggtcgggctgaacggggggttcgtgcacacagcccagcttggagcgaacgacctacaccgaactgagatacctacagcgtgagctatgagaaagcgccacgcttcccgaagggagaaaggcggacaggtatccggtaagcggcagggtcggaacaggagagcgcacgagggagcttccagggggaaacgcctggtatctttatagtcctgtcgggtttcgccacctctgacttgagcgtcgatttttgtgatgctcgtcaggggggcggagcctatggaaaaacgccagcaacgcggcctttttacggttcctggccttttgctggccttttgctcacatgttctttcctgcgttatcccctgattctgtggataaccgtattaccgcctttgagtgagctgataccgctcgccgcagccgaacgaccgagcgcagcgagtcagtgagcgaggaagcggaagagcgcccaatacgcaaaccgcctctccccgcgcgttggccgattcattaatgcagctggcacgacaggtttcccgactggaaagcgggcagtgagcgcaacgcaattaatgtgagttagctcactcattaggcaccccaggctttacactttatgcttccggctcgtatgttgtgtggaattgtgagcggataacaatttcacacaggaaacagctatgaccatgattacgccaagcttgcatgcctgcaggcagctgcgcgctcgctcgctcactgaggccgcccgggcgtcgggcgacctttggtcgcccggcctcagtgagcgagcgagcgcgcagagagggagtggccaactccatcactaggggttcctggaggggtggagtcgtgacgtaaagatctgatatcatcgatcgcgatgcattaattaagcggccgaggctcagaggcacacaggagtttctgggctcaccctgcccccttccaacccctcagttcccatcctccagcagctgtttgtgtgctgcctctgaagtccacactgaacaaacttcagcctactcatgtccctaaaatgggcaaacattgcaagcagcaaacagcaaacacacagccctccctgcctgctgaccttggagctggggcagaggtcagagacctctctgggcccatgccacctccaacatccactcgaccccttggaatttcggtggagaggagcagaggttgtcctggcgtggtttaggtagtgtgagaggggtacccggggatcttgctaccagtggaacagccactaaggattctgcagtgagagcagagggccagctaagtggtactctcccagagactgtctgactcacgccaccccctccaccttggacacaggacgctgtggtttctgagccaggtacaatgactcctttcggtaagtgcagtggaagctgtacactgcccaggcaaagcgtccgggcagcgtaggcgggcgactcagatcccagccagtggacttagcccctgtttgctcctccgataactggggtgaccttggttaatattcaccagcagcctcccccgttgcccctctggatccactgcttaaatacggacgaggacagggccctgtctcctcagcttcaggcaccaccactgacctgggacagtgaatgatccccctgatctgcggcctcgacggtatcgataagcttgatatcgaattctagtcgtcgaccactttcacaatctgctagcaaaggttgccaccatgcagcgcgtgaacatgatcatggcagaatcaccaggcctcatcaccatctgccttttaggatatctactcagtgctgaatgtacaggtttgtttccttttttaaaatacattgagtatgcttgccttttagatatagaaatatctgatgctgtcttcttcactaaattttgattacatgatttgacagcaatattgaagagtctaacagccagcacgcaggttggtaagtactggttctttgttagctaggttttcttcttcttcatttttaaaactaaatagatcgacaatgcttatgatgcatttatgtttaataaacactgttcagttcatgatttggtcatgtaattcctgttagaaaacattcatctccttggtttaaaaaaattaaaagtgggaaaacaaagaaatagcagaatatagtgaaaaaaaataaccacattatttttgtttggacttaccactttgaaatcaaaatgggaaacaaaagcacaaacaatggccttatttacacaaaaagtctgattttaagatatatgacatttcaaggtttcagaagtatgtaatgaggtgtgtctctaattttttaaattatatatcttcaatttaaagttttagttaaaacataaagattaacctttcattagcaagctgttagttatcaccaaagcttttcatggattaggaaaaaatcattttgtctctatgtcaaacatcttggagttgatatttggggaaacacaatactcagttgagttccctaggggagaaaagcaagcttaagaattgacataaagagtaggaagttagctaatgcaacatatatcactttgttttttcacaactacagtgactttatgtatttcccagaggaaggcatacagggaagaaattatcccatttggacaaacagcatgttctcacaggaagcatttatcacacttacttgtcaactttctagaatcaaatctagtagctgacagtaccaggatcaggggtgccaaccctaagcacccccagaaagctgactggccctgtggttcccactccagacatgatgtcagctgtgaaatcgacgtcgctggaccataattaggcttctgttcttcaggagacatttgttcaaagtcatttgggcaaccatattctgaaaacagcccagccagggtgatggatcactttgcaaagatcctcaatgagctattttcaagtgatgacaaagtgtgaagttaaccgctcatttgagaactttctttttcatccaaagtaaattcaaatatgattagaaatctgaccttttattactggaattctcttgactaaaagtaaaattgaattttaattcctaaatctccatgtgtatacagtactgtgggaacatcacagattttggctccatgccctaaagagaaattggctttcagattatttggattaaaaacaaagactttcttaagagatgtaaaattttcatgatgttttcttttttgctaaaactaaagaattattcttttacatttcagtttttcttgatcatgaaaacgccaacaaaattctgaatcggccaaagaggtataattcaggtaaattggaagagtttgttcaagggaaccttgagagagaatgtatggaagaaaagtgtagttttgaagaagcacgagaagtttttgaaaacactgaaagaacaactgaattttggaagcagtatgttgatggagatcagtgtgagtccaatccatgtttaaatggcggcagttgcaaggatgacattaattcctatgaatgttggtgtccctttggatttgaaggaaagaactgtgaattagatgtaacatgtaacattaagaatggcagatgcgagcagttttgtaaaaatagtgctgataacaaggtggtttgctcctgtactgagggatatcgacttgcagaaaaccagaagtcctgtgaaccagcagtgccatttccatgtggaagagtttctgtttcacaaacttctaagctcacccgtgctgaggctgtttttcctgatgtggactatgtaaattctactgaagctgaaaccattttggataacatcactcaaagcacccaatcatttaatgacttcactcgggttgttggtggagaagatgccaaaccaggtcaattcccttggcaggttgttttgaatggtaaagttgatgcattctgtggaggctctatcgttaatgaaaaatggattgtaactgctgcccactgtgttgaaactggtgttaaaattacagttgtcgcaggtgaacataatattgaggagacagaacatacagagcaaaagcgaaatgtgattcgaattattcctcaccacaactacaatgcagctattaataagtacaaccatgacattgcccttctggaactggacgaacccttagtgctaaacagctacgttacacctatttgcattgctgacaaggaatacacgaacatcttcctcaaatttggatctggctatgtaagtggctggggaagagtcttccacaaagggtactcagctttagttcttcagtaccttagagttccacttgttgaccgagccacatgtcttgaatctacaaagttcaggatctataacaacatgttctgtgctggcttccatgaaggaggtagagattcatgtcaaggagatagtgggggaccccatgttactgaagtggaagggaccagtttcttaactggaattattagctggggtgaagagtgtgcaatgaaaggcaaatatggaatatataccaaggtatcccggtatgtcaactggattaaggaaaaaacaaagctcacttaatgaaagatggatttccaaggttaattcattggaattgaaaattaacagccccccccccccccccctgcagatctcgagccgaattcctgcagcccgggggatcagcctcgactgtgccttctagttgccagccatctgttgtttgcccctcccccgtgccttccttgaccctggaaggtgccactcccactgtcctttcctaataaaatgaggaaattgcatcgcattgtctgagtaggtgtcattctattctggggggtggggtggggcaggacagcaagggggaggattgggaagacaatagcaggcatgctggggatgcggtgggctctatggcttctgaggcggaaagaaccagctggggctcgagatccactagactagtgtacacgcgtgatatcagatctgttacgtagataagtagcatggcgggttaatcattaactacaaggaacccctagtgatggagttggccactccctctctgcgcgctcgctcgctcactgaggccgggcgaccaaaggtcgcccgacgcccgggctttgcccgggcggcctcagtgagcgagcgagcgcgcagctgcctgcaggtcgactctagaggatccccgggtaccgagctcgaattcactggccgtcgttttacaacgtcgtgactgggaaaaccctggcgttacccaacttaatcgccttgcagcacatccccctttcgccagctggcgtaatagcgaagaggcccgcaccgatcgcccttcccaacagttgcgcagcctgaatggcgaatggcgcctgatgcggtattttctccttacgcatctgtgcggtatttcacaccgcatacgtcaaagcaaccatagtacgcgccctgtagcggcgcattaagcgcggcgggtgtggtggttacgcgcagcgtgaccgctacacttgccagcgcttagcgcccgctcctttcgctttcttcccttcctttctcgccacgttcgccggctttccccgtcaagctctaaatcgggggctccctttagggttccgatttagtgctttacggcacctcgaccccaaaaaacttgatttgggtgatggttcacgtagtgggccatcgccctgatagacggtttttcgccctttgacgttggagtccacgttctttaatagtggactcttgttccaaactggaacaacactcaactctatctcgggctattcttttgatttataagggattttgccgatttcggtctattggttaaaaaatgagctgatttaacaaaaatttaacgcgaattttaacaaaatattaacgtttacaattttatggtgcactctcagtacaatctgctctgatgccgcatagttaagccagccccgacacccgccaacacccgctgacgcgccctgacgggcttgtctgctcccggcatccgcttacagacaagctgtgaccgtctccgggagctgcatgtgtcagaggttttcaccgtcatcaccgaaacgcgcgagacgaaagggcctcgtgatacgcctatttttataggttaatgtcatgataataatggtttcttagacgtcaggtggcacttttcggggaaatgtgcgcggaacccctatttgtttatttttctaaatacattcaaatatgtatccgctcatgagacaataaccctgataaatgcttcaataatattgaaaaaggaagagtatgagtattcaacatttccgtgtcgcccttattcccttttttgcggcattttgccttcctgtttttgctcacccagaaacgctggtgaaagtaaaagatgctgaagatcagttgggtgcacgagtgggttacatcgaactggatctcaacagcggtaagatccttgagagttttcgccccgaagaacgttttccaatgatgagcacttttaaagttctgctatgtggcgcggtattatcccgtattgacgccgggcaagagcaactcggtcgccgcatacactattctcagaatgacttggttgagtactcaccagtcacagaaaagcatcttacggatggcatgacagtaagagaattatgcagtgctgccataaccatgagtgataacactgcggccaacttacttctgacaacgatcggaggaccgaaggagctaaccgcttttttgcacaacatgg

SEQ ID NO: 455 - DNA, 7585 bp, Artificial Sequence
  AAV-human FIX T148A/R338L vector
gggatcatgtaactcgccttgatcgttgggaaccggagctgaatgaagccataccaaacgacgagcgtgacaccacgatgcctgtagcaatggcaacaacgttgcgcaaactattaactggcgaactacttactctagcttcccggcaacaattaatagactggatggaggcggataaagttgcaggaccacttctgcgctcggcccttccggctggctggtttattgctgataaatctggagccggtgagcgtgggtctcgcggtatcattgcagcactggggccagatggtaagccctcccgtatcgtagttatctacacgacggggagtcaggcaactatggatgaacgaaatagacagatcgctgagataggtgcctcactgattaagcattggtaactgtcagaccaagtttactcatatatactttagattgatttaaaacttcatttttaatttaaaaggatctaggtgaagatcctttttgataatctcatgaccaaaatcccttaacgtgagttttcgttccactgagcgtcagaccccgtagaaaagatcaaaggatcttcttgagatcctttttttctgcgcgtaatctgctgcttgcaaacaaaaaaaccaccgctaccagcggtggtttgtttgccggatcaagagctaccaactctttttccgaaggtaactggcttcagcagagcgcagataccaaatactgttcttctagtgtagccgtagttaggccaccacttcaagaactctgtagcaccgcctacatacctcgctctgctaatcctgttaccagtggctgctgccagtggcgataagtcgtgtcttaccgggttggactcaagacgatagttaccggataaggcgcagcggtcgggctgaacggggggttcgtgcacacagcccagcttggagcgaacgacctacaccgaactgagatacctacagcgtgagctatgagaaagcgccacgcttcccgaagggagaaaggcggacaggtatccggtaagcggcagggtcggaacaggagagcgcacgagggagcttccagggggaaacgcctggtatctttatagtcctgtcgggtttcgccacctctgacttgagcgtcgatttttgtgatgctcgtcaggggggcggagcctatggaaaaacgccagcaacgcggcctttttacggttcctggccttttgctggccttttgctcacatgttctttcctgcgttatcccctgattctgtggataaccgtattaccgcctttgagtgagctgataccgctcgccgcagccgaacgaccgagcgcagcgagtcagtgagcgaggaagcggaagagcgcccaatacgcaaaccgcctctccccgcgcgttggccgattcattaatgcagctggcacgacaggtttcccgactggaaagcgggcagtgagcgcaacgcaattaatgtgagttagctcactcattaggcaccccaggctttacactttatgcttccggctcgtatgttgtgtggaattgtgagcggataacaatttcacacaggaaacagctatgaccatgattacgccaagcttgcatgcctgcaggcagctgcgcgctcgctcgctcactgaggccgcccgggcgtcgggcgacctttggtcgcccggcctcagtgagcgagcgagcgcgcagagagggagtggccaactccatcactaggggttcctggaggggtggagtcgtgacgtaaagatctgatatcatcgatcgcgatgcattaattaagcggccgaggctcagaggcacacaggagtttctgggctcaccctgcccccttccaacccctcagttcccatcctccagcagctgtttgtgtgctgcctctgaagtccacactgaacaaacttcagcctactcatgtccctaaaatgggcaaacattgcaagcagcaaacagcaaacacacagccctccctgcctgctgaccttggagctggggcagaggtcagagacctctctgggcccatgccacctccaacatccactcgaccccttggaatttcggtggagaggagcagaggttgtcctggcgtggtttaggtagtgtgagaggggtacccggggatcttgctaccagtggaacagccactaaggattctgcagtgagagcagagggccagctaagtggtactctcccagagactgtctgactcacgccaccccctccaccttggacacaggacgctgtggtttctgagccaggtacaatgactcctttcggtaagtgcagtggaagctgtacactgcccaggcaaagcgtccgggcagcgtaggcgggcgactcagatcccagccagtggacttagcccctgtttgctcctccgataactggggtgaccttggttaatattcaccagcagcctcccccgttgcccctctggatccactgcttaaatacggacgaggacagggccctgtctcctcagcttcaggcaccaccactgacctgggacagtgaatgatccccctgatctgcggcctcgacggtatcgataagcttgatatcgaattctagtcgtcgaccactttcacaatctgctagcaaaggttgccaccatgcagcgcgtgaacatgatcatggcagaatcaccaggcctcatcaccatctgccttttaggatatctactcagtgctgaatgtacaggtttgtttccttttttaaaatacattgagtatgcttgccttttagatatagaaatatctgatgctgtcttcttcactaaattttgattacatgatttgacagcaatattgaagagtctaacagccagcacgcaggttggtaagtactggttctttgttagctaggttttcttcttcttcatttttaaaactaaatagatcgacaatgcttatgatgcatttatgtttaataaacactgttcagttcatgatttggtcatgtaattcctgttagaaaacattcatctccttggtttaaaaaaattaaaagtgggaaaacaaagaaatagcagaatatagtgaaaaaaaataaccacattatttttgtttggacttaccactttgaaatcaaaatgggaaacaaaagcacaaacaatggccttatttacacaaaaagtctgattttaagatatatgacatttcaaggtttcagaagtatgtaatgaggtgtgtctctaattttttaaattatatatcttcaatttaaagttttagttaaaacataaagattaacctttcattagcaagctgttagttatcaccaaagcttttcatggattaggaaaaaatcattttgtctctatgtcaaacatcttggagttgatatttggggaaacacaatactcagttgagttccctaggggagaaaagcaagcttaagaattgacataaagagtaggaagttagctaatgcaacatatatcactttgttttttcacaactacagtgactttatgtatttcccagaggaaggcatacagggaagaaattatcccatttggacaaacagcatgttctcacaggaagcatttatcacacttacttgtcaactttctagaatcaaatctagtagctgacagtaccaggatcaggggtgccaaccctaagcacccccagaaagctgactggccctgtggttcccactccagacatgatgtcagctgtgaaatcgacgtcgctggaccataattaggcttctgttcttcaggagacatttgttcaaagtcatttgggcaaccatattctgaaaacagcccagccagggtgatggatcactttgcaaagatcctcaatgagctattttcaagtgatgacaaagtgtgaagttaaccgctcatttgagaactttctttttcatccaaagtaaattcaaatatgattagaaatctgaccttttattactggaattctcttgactaaaagtaaaattgaattttaattcctaaatctccatgtgtatacagtactgtgggaacatcacagattttggctccatgccctaaagagaaattggctttcagattatttggattaaaaacaaagactttcttaagagatgtaaaattttcatgatgttttcttttttgctaaaactaaagaattattcttttacatttcagtttttcttgatcatgaaaacgccaacaaaattctgaatcggccaaagaggtataattcaggtaaattggaagagtttgttcaagggaaccttgagagagaatgtatggaagaaaagtgtagttttgaagaagcacgagaagtttttgaaaacactgaaagaacaactgaattttggaagcagtatgttgatggagatcagtgtgagtccaatccatgtttaaatggcggcagttgcaaggatgacattaattcctatgaatgttggtgtccctttggatttgaaggaaagaactgtgaattagatgtaacatgtaacattaagaatggcagatgcgagcagttttgtaaaaatagtgctgataacaaggtggtttgctcctgtactgagggatatcgacttgcagaaaaccagaagtcctgtgaaccagcagtgccatttccatgtggaagagtttctgtttcacaaacttctaagctcacccgtgctgaggctgtttttcctgatgtggactatgtaaattctactgaagctgaaaccattttggataacatcactcaaagcacccaatcatttaatgacttcactcgggttgttggtggagaagatgccaaaccaggtcaattcccttggcaggttgttttgaatggtaaagttgatgcattctgtggaggctctatcgttaatgaaaaatggattgtaactgctgcccactgtgttgaaactggtgttaaaattacagttgtcgcaggtgaacataatattgaggagacagaacatacagagcaaaagcgaaatgtgattcgaattattcctcaccacaactacaatgcagctattaataagtacaaccatgacattgcccttctggaactggacgaacccttagtgctaaacagctacgttacacctatttgcattgctgacaaggaatacacgaacatcttcctcaaatttggatctggctatgtaagtggctggggaagagtcttccacaaagggagatcagctttagttcttcagtaccttagagttccacttgttgaccgagccacatgtcttctgtctacaaagttcaccatctataacaacatgttctgtgctggcttccatgaaggaggtagagattcatgtcaaggagatagtgggggaccccatgttactgaagtggaagggaccagtttcttaactggaattattagctggggtgaagagtgtgcaatgaaaggcaaatatggaatatataccaaggtatcccggtatgtcaactggattaaggaaaaaacaaagctcacttaatgaaagatggatttccaaggttaattcattggaattgaaaattaacagccccccccccccccccctgcagatctcgagccgaattcctgcagcccgggggatcagcctcgactgtgccttctagttgccagccatctgttgtttgcccctcccccgtgccttccttgaccctggaaggtgccactcccactgtcctttcctaataaaatgaggaaattgcatcgcattgtctgagtaggtgtcattctattctggggggtggggtggggcaggacagcaagggggaggattgggaagacaatagcaggcatgctggggatgcggtgggctctatggcttctgaggcggaaagaaccagctggggctcgagatccactagactagtgtacacgcgtgatatcagatctgttacgtagataagtagcatggcgggttaatcattaactacaaggaacccctagtgatggagttggccactccctctctgcgcgctcgctcgctcactgaggccgggcgaccaaaggtcgcccgacgcccgggctttgcccgggcggcctcagtgagcgagcgagcgcgcagctgcctgcaggtcgactctagaggatccccgggtaccgagctcgaattcactggccgtcgttttacaacgtcgtgactgggaaaaccctggcgttacccaacttaatcgccttgcagcacatccccctttcgccagctggcgtaatagcgaagaggcccgcaccgatcgcccttcccaacagttgcgcagcctgaatggcgaatggcgcctgatgcggtattttctccttacgcatctgtgcggtatttcacaccgcatacgtcaaagcaaccatagtacgcgccctgtagcggcgcattaagcgcggcgggtgtggtggttacgcgcagcgtgaccgctacacttgccagcgcttagcgcccgctcctttcgctttcttcccttcctttctcgccacgttcgccggctttccccgtcaagctctaaatcgggggctccctttagggttccgatttagtgctttacggcacctcgaccccaaaaaacttgatttgggtgatggttcacgtagtgggccatcgccctgatagacggtttttcgccctttgacgttggagtccacgttctttaatagtggactcttgttccaaactggaacaacactcaactctatctcgggctattcttttgatttataagggattttgccgatttcggtctattggttaaaaaatgagctgatttaacaaaaatttaacgcgaattttaacaaaatattaacgtttacaattttatggtgcactctcagtacaatctgctctgatgccgcatagttaagccagccccgacacccgccaacacccgctgacgcgccctgacgggcttgtctgctcccggcatccgcttacagacaagctgtgaccgtctccgggagctgcatgtgtcagaggttttcaccgtcatcaccgaaacgcgcgagacgaaagggcctcgtgatacgcctatttttataggttaatgtcatgataataatggtttcttagacgtcaggtggcacttttcggggaaatgtgcgcggaacccctatttgtttatttttctaaatacattcaaatatgtatccgctcatgagacaataaccctgataaatgcttcaataatattgaaaaaggaagagtatgagtattcaacatttccgtgtcgcccttattcccttttttgcggcattttgccttcctgtttttgctcacccagaaacgctggtgaaagtaaaagatgctgaagatcagttgggtgcacgagtgggttacatcgaactggatctcaacagcggtaagatccttgagagttttcgccccgaagaacgttttccaatgatgagcacttttaaagttctgctatgtggcgcggtattatcccgtattgacgccgggcaagagcaactcggtcgccgcatacactattctcagaatgacttggttgagtactcaccagtcacagaaaagcatcttacggatggcatgacagtaagagaattatgcagtgctgccataaccatgagtgataacactgcggccaacttacttctgacaacgatcggaggaccgaaggagctaaccgcttttttgcacaacatgg

SEQ ID NO: 456 - DNA, 4410 bp, Artificial Sequence
  ITR-ApoE/C1-antitrypsin promoter-FIXss-Pro-mini Intron-human WTFIX mouse optimized-bGHpolyA-ITR
  repeat_region (1)...(119): ITR
  enhancer (185)...(505): ApoE/C1
  promoter (515)...(907): huSerpin A antitrypsin liver specific promoter
  misc_feature (1002)...(1007): kozak
  sig_peptide (1008)...(1091)
  misc_feature (1092)...(1094): FIX propeptide
  intron (1095)...(2532): FIX partial intron
  misc_feature (2533)...(2583): FIX propeptide
  mat_peptide (2584)...(3831): FIX mature
  polyA_signal (3943)...(4167): bGH poly(A)
  repeat_region (4281)...(4410): ITR
ctgcgcgctcgctcgctcactgaggccgcccgggcgtcgggcgacctttggtcgcccggcctcagtgagcgagcgagcgcgcagagagggagtggccaactccatcactaggggttcctggaggggtggagtcgtgacgtaaagatctgatatcatcgatcgcgatgcattaattaagcggccgaggctcagaggcacacaggagtttctgggctcaccctgcccccttccaacccctcagttcccatcctccagcagctgtttgtgtgctgcctctgaagtccacactgaacaaacttcagcctactcatgtccctaaaatgggcaaacattgcaagcagcaaacagcaaacacacagccctccctgcctgctgaccttggagctggggcagaggtcagagacctctctgggcccatgccacctccaacatccactcgaccccttggaatttcggtggagaggagcagaggttgtcctggcgtggtttaggtagtgtgagaggggtacccggggatcttgctaccagtggaacagccactaaggattctgcagtgagagcagagggccagctaagtggtactctcccagagactgtctgactcacgccaccccctccaccttggacacaggacgctgtggtttctgagccaggtacaatgactcctttcggtaagtgcagtggaagctgtacactgcccaggcaaagcgtccgggcagcgtaggcgggcgactcagatcccagccagtggacttagcccctgtttgctcctccgataactggggtgaccttggttaatattcaccagcagcctcccccgttgcccctctggatccactgcttaaatacggacgaggacagggccctgtctcctcagcttcaggcaccaccactgacctgggacagtgaatgatccccctgatctgcggcctcgacggtatcgataagcttgatatcgaattctagtcgtcgaccactttcacaatctgctagcaaaggttgccaccatgcagcgcgtgaacatgattatggccgagagccctggcctgatcaccatctgcctgctgggctacctgctgagcgccgagtgtacaggtttgtttccttttttaaaatacattgagtatgcttgccttttagatatagaaatatctgatgctgtcttcttcactaaattttgattacatgatttgacagcaatattgaagagtctaacagccagcacgcaggttggtaagtactggttctttgttagctaggttttcttcttcttcatttttaaaactaaatagatcgacaatgcttatgatgcatttatgtttaataaacactgttcagttcatgatttggtcatgtaattcctgttagaaaacattcatctccttggtttaaaaaaattaaaagtgggaaaacaaagaaatagcagaatatagtgaaaaaaaataaccacattatttttgtttggacttaccactttgaaatcaaaatgggaaacaaaagcacaaacaatggccttatttacacaaaaagtctgattttaagatatatgacatttcaaggtttcagaagtatgtaatgaggtgtgtctctaattttttaaattatatatcttcaatttaaagttttagttaaaacataaagattaacctttcattagcaagctgttagttatcaccaaagcttttcatggattaggaaaaaatcattttgtctctatgtcaaacatcttggagttgatatttggggaaacacaatactcagttgagttccctaggggagaaaagcaagcttaagaattgacataaagagtaggaagttagctaatgcaacatatatcactttgttttttcacaactacagtgactttatgtatttcccagaggaaggcatacagggaagaaattatcccatttggacaaacagcatgttctcacaggaagcatttatcacacttacttgtcaactttctagaatcaaatctagtagctgacagtaccaggatcaggggtgccaaccctaagcacccccagaaagctgactggccctgtggttcccactccagacatgatgtcagctgtgaaatcgacgtcgctggaccataattaggcttctgttcttcaggagacatttgttcaaagtcatttgggcaaccatattctgaaaacagcccagccagggtgatggatcactttgcaaagatcctcaatgagctattttcaagtgatgacaaagtgtgaagttaaccgctcatttgagaactttctttttcatccaaagtaaattcaaatatgattagaaatctgaccttttattactggaattctcttgactaaaagtaaaattgaattttaattcctaaatctccatgtgtatacagtactgtgggaacatcacagattttggctccatgccctaaagagaaattggctttcagattatttggattaaaaacaaagactttcttaagagatgtaaaattttcatgatgttttcttttttgctaaaactaaagaattattcttttacatttcagtgttcctggaccacgagaacgccaacaagatcctgaacagacccaagagatacaacagcggcaagctggaagagttcgtgcagggcaacctggaacgcgagtgcatggaagagaagtgcagcttcgaagaggccagagaggtgttcgagaacaccgagagaaccaccgagttctggaagcagtacgtggacggcgaccagtgcgagagcaacccttgtctgaacggcggcagctgcaaggacgacatcaacagctacgagtgctggtgccccttcggcttcgagggcaagaactgcgagctggacgtgacctgcaacatcaagaacggcagatgcgagcagttctgcaagaacagcgccgacaacaaggtcgtgtgctcctgcaccgagggctacagactggccgagaaccagaagtcctgcgagcccgctgtgcctttcccatgcggaagagtgtccgtgtcccagaccagcaagctgaccagagccgagacagtgttccccgacgtggactacgtgaacagcaccgaggccgagacaatcctggacaacatcacccagagcacccagtccttcaacgacttcaccagagtcgtgggcggcgaggatgctaagcctggccagttcccgtggcaggtggtgctgaacggaaaggtggacgccttctgcggcggctccatcgtgaacgagaagtggatcgtgacagccgcccactgcgtggaaaccggcgtgaagatcacagtggtggccggcgagcacaacatcgaggaaaccgagcacacagagcagaaaagaaacgtgatcaggatcatcccccaccacaactacaacgccgccatcaacaagtacaaccacgatatcgccctgctggaactggacgagcccctggtgctgaatagctacgtgacccccatctgtatcgccgacaaagagtacaccaacatctttctgaagttcggcagcggctacgtgtccggctggggcagagtgtttcacaagggcagatccgctctggtgctgcagtacctgagagtgcctctggtggacagagccacctgtctgagaagcaccaagttcaccatctacaacaacatgttctgcgctggcttccacgagggcggcagagactcttgtcagggcgattctggcggccctcacgtgacagaggtggaaggcaccagctttctgaccggcatcatcagctggggcgaggaatgcgccatgaaggggaagtacggcatctacaccaaggtgtccagatacgtgaactggatcaaagaaaagaccaagctgacataatgaaagatggatttccaaggttaattcattggaattgaaaattaacagccccccccccccccccctgcagatctcgagccgaattcctgcagcccgggggatcagcctcgactgtgccttctagttgccagccatctgttgtttgcccctcccccgtgccttccttgaccctggaaggtgccactcccactgtcctttcctaataaaatgaggaaattgcatcgcattgtctgagtaggtgtcattctattctggggggtggggtggggcaggacagcaagggggaggattgggaagacaatagcaggcatgctggggatgcggtgggctctatggcttctgaggcggaaagaaccagctggggctcgagatccactagactagtgtacacgcgtgatatcagatctgttacgtagataagtagcatggcgggttaatcattaactacaaggaacccctagtgatggagttggccactccctctctgcgcgctcgctcgctcactgaggccgggcgaccaaaggtcgcccgacgcccgggctttgcccgggcggcctcagtgagcgagcgagcgcgcag

SEQ ID NO: 457 - DNA, 4410 bp, Artificial Sequence
  ITR-ApoE/C1-antitrypsin promoter-FIXss-Pro-mini Intron-human FIX R318Y/R338E/T343R mouse optimized-bGHpolyA-ITR
ctgcgcgctcgctcgctcactgaggccgcccgggcgtcgggcgacctttggtcgcccggcctcagtgagcgagcgagcgcgcagagagggagtggccaactccatcactaggggttcctggaggggtggagtcgtgacgtaaagatctgatatcatcgatcgcgatgcattaattaagcggccgaggctcagaggcacacaggagtttctgggctcaccctgcccccttccaacccctcagttcccatcctccagcagctgtttgtgtgctgcctctgaagtccacactgaacaaacttcagcctactcatgtccctaaaatgggcaaacattgcaagcagcaaacagcaaacacacagccctccctgcctgctgaccttggagctggggcagaggtcagagacctctctgggcccatgccacctccaacatccactcgaccccttggaatttcggtggagaggagcagaggttgtcctggcgtggtttaggtagtgtgagaggggtacccggggatcttgctaccagtggaacagccactaaggattctgcagtgagagcagagggccagctaagtggtactctcccagagactgtctgactcacgccaccccctccaccttggacacaggacgctgtggtttctgagccaggtacaatgactcctttcggtaagtgcagtggaagctgtacactgcccaggcaaagcgtccgggcagcgtaggcgggcgactcagatcccagccagtggacttagcccctgtttgctcctccgataactggggtgaccttggttaatattcaccagcagcctcccccgttgcccctctggatccactgcttaaatacggacgaggacagggccctgtctcctcagcttcaggcaccaccactgacctgggacagtgaatgatccccctgatctgcggcctcgacggtatcgataagcttgatatcgaattctagtcgtcgaccactttcacaatctgctagcaaaggttgccaccatgcagcgcgtgaacatgattatggccgagagccctggcctgatcaccatctgcctgctgggctacctgctgagcgccgagtgtacaggtttgtttccttttttaaaatacattgagtatgcttgccttttagatatagaaatatctgatgctgtcttcttcactaaattttgattacatgatttgacagcaatattgaagagtctaacagccagcacgcaggttggtaagtactggttctttgttagctaggttttcttcttcttcatttttaaaactaaatagatcgacaatgcttatgatgcatttatgtttaataaacactgttcagttcatgatttggtcatgtaattcctgttagaaaacattcatctccttggtttaaaaaaattaaaagtgggaaaacaaagaaatagcagaatatagtgaaaaaaaataaccacattatttttgtttggacttaccactttgaaatcaaaatgggaaacaaaagcacaaacaatggccttatttacacaaaaagtctgattttaagatatatgacatttcaaggtttcagaagtatgtaatgaggtgtgtctctaattttttaaattatatatcttcaatttaaagttttagttaaaacataaagattaacctttcattagcaagctgttagttatcaccaaagcttttcatggattaggaaaaaatcattttgtctctatgtcaaacatcttggagttgatatttggggaaacacaatactcagttgagttccctaggggagaaaagcaagcttaagaattgacataaagagtaggaagttagctaatgcaacatatatcactttgttttttcacaactacagtgactttatgtatttcccagaggaaggcatacagggaagaaattatcccatttggacaaacagcatgttctcacaggaagcatttatcacacttacttgtcaactttctagaatcaaatctagtagctgacagtaccaggatcaggggtgccaaccctaagcacccccagaaagctgactggccctgtggttcccactccagacatgatgtcagctgtgaaatcgacgtcgctggaccataattaggcttctgttcttcaggagacatttgttcaaagtcatttgggcaaccatattctgaaaacagcccagccagggtgatggatcactttgcaaagatcctcaatgagctattttcaagtgatgacaaagtgtgaagttaaccgctcatttgagaactttctttttcatccaaagtaaattcaaatatgattagaaatctgaccttttattactggaattctcttgactaaaagtaaaattgaattttaattcctaaatctccatgtgtatacagtactgtgggaacatcacagattttggctccatgccctaaagagaaattggctttcagattatttggattaaaaacaaagactttcttaagagatgtaaaattttcatgatgttttcttttttgctaaaactaaagaattattcttttacatttcagtgttcctggaccacgagaacgccaacaagatcctgaacagacccaagagatacaacagcggcaagctggaagagttcgtgcagggcaacctggaacgcgagtgcatggaagagaagtgcagcttcgaagaggccagagaggtgttcgagaacaccgagagaaccaccgagttctggaagcagtacgtggacggcgaccagtgcgagagcaacccttgtctgaacggcggcagctgcaaggacgacatcaacagctacgagtgctggtgccccttcggcttcgagggcaagaactgcgagctggacgtgacctgcaacatcaagaacggcagatgcgagcagttctgcaagaacagcgccgacaacaaggtcgtgtgctcctgcaccgagggctacagactggccgagaaccagaagtcctgcgagcccgctgtgcctttcccatgcggaagagtgtccgtgtcccagaccagcaagctgaccagagccgagacagtgttccccgacgtggactacgtgaacagcaccgaggccgagacaatcctggacaacatcacccagagcacccagtccttcaacgacttcaccagagtcgtgggcggcgaggatgctaagcctggccagttcccgtggcaggtggtgctgaacggaaaggtggacgccttctgcggcggctccatcgtgaacgagaagtggatcgtgacagccgcccactgcgtggaaaccggcgtgaagatcacagtggtggccggcgagcacaacatcgaggaaaccgagcacacagagcagaaaagaaacgtgatcaggatcatcccccaccacaactacaacgccgccatcaacaagtacaaccacgatatcgccctgctggaactggacgagcccctggtgctgaatagctacgtgacccccatctgtatcgccgacaaagagtacaccaacatctttctgaagttcggcagcggctacgtgtccggctggggcagagtgtttcacaagggctactccgctctggtgctgcagtacctgagagtgcctctggtggacagagccacctgtctggaaagcaccaagttcagaatctacaacaacatgttctgcgctggcttccacgagggcggcagagactcttgtcagggcgattctggcggccctcacgtgacagaggtggaaggcaccagctttctgaccggcatcatcagctggggcgaggaatgcgccatgaaggggaagtacggcatctacaccaaggtgtccagatacgtgaactggatcaaagaaaagaccaagctgacataatgaaagatggatttccaaggttaattcattggaattgaaaattaacagccccccccccccccccctgcagatctcgagccgaattcctgcagcccgggggatcagcctcgactgtgccttctagttgccagccatctgttgtttgcccctcccccgtgccttccttgaccctggaaggtgccactcccactgtcctttcctaataaaatgaggaaattgcatcgcattgtctgagtaggtgtcattctattctggggggtggggtggggcaggacagcaagggggaggattgggaagacaatagcaggcatgctggggatgcggtgggctctatggcttctgaggcggaaagaaccagctggggctcgagatccactagactagtgtacacgcgtgatatcagatctgttacgtagataagtagcatggcgggttaatcattaactacaaggaacccctagtgatggagttggccactccctctctgcgcgctcgctcgctcactgaggccgggcgaccaaaggtcgcccgacgcccgggctttgcccgggcggcctcagtgagcgagcgagcgcgcag

SEQ ID NO: 458 - DNA, 4410 bp, Artificial Sequence
  ITR-ApoE/C1-antitrypsin promoter-FIXss-Pro-mini Intron-human FIX R338L mouse optimized-bGHpolyA-ITR
ctgcgcgctcgctcgctcactgaggccgcccgggcgtcgggcgacctttggtcgcccggcctcagtgagcgagcgagcgcgcagagagggagtggccaactccatcactaggggttcctggaggggtggagtcgtgacgtaaagatctgatatcatcgatcgcgatgcattaattaagcggccgaggctcagaggcacacaggagtttctgggctcaccctgcccccttccaacccctcagttcccatcctccagcagctgtttgtgtgctgcctctgaagtccacactgaacaaacttcagcctactcatgtccctaaaatgggcaaacattgcaagcagcaaacagcaaacacacagccctccctgcctgctgaccttggagctggggcagaggtcagagacctctctgggcccatgccacctccaacatccactcgaccccttggaatttcggtggagaggagcagaggttgtcctggcgtggtttaggtagtgtgagaggggtacccggggatcttgctaccagtggaacagccactaaggattctgcagtgagagcagagggccagctaagtggtactctcccagagactgtctgactcacgccaccccctccaccttggacacaggacgctgtggtttctgagccaggtacaatgactcctttcggtaagtgcagtggaagctgtacactgcccaggcaaagcgtccgggcagcgtaggcgggcgactcagatcccagccagtggacttagcccctgtttgctcctccgataactggggtgaccttggttaatattcaccagcagcctcccccgttgcccctctggatccactgcttaaatacggacgaggacagggccctgtctcctcagcttcaggcaccaccactgacctgggacagtgaatgatccccctgatctgcggcctcgacggtatcgataagcttgatatcgaattctagtcgtcgaccactttcacaatctgctagcaaaggttgccaccatgcagcgcgtgaacatgattatggccgagagccctggcctgatcaccatctgcctgctgggctacctgctgagcgccgagtgtacaggtttgtttccttttttaaaatacattgagtatgcttgccttttagatatagaaatatctgatgctgtcttcttcactaaattttgattacatgatttgacagcaatattgaagagtctaacagccagcacgcaggttggtaagtactggttctttgttagctaggttttcttcttcttcatttttaaaactaaatagatcgacaatgcttatgatgcatttatgtttaataaacactgttcagttcatgatttggtcatgtaattcctgttagaaaacattcatctccttggtttaaaaaaattaaaagtgggaaaacaaagaaatagcagaatatagtgaaaaaaaataaccacattatttttgtttggacttaccactttgaaatcaaaatgggaaacaaaagcacaaacaatggccttatttacacaaaaagtctgattttaagatatatgacatttcaaggtttcagaagtatgtaatgaggtgtgtctctaattttttaaattatatatcttcaatttaaagttttagttaaaacataaagattaacctttcattagcaagctgttagttatcaccaaagcttttcatggattaggaaaaaatcattttgtctctatgtcaaacatcttggagttgatatttggggaaacacaatactcagttgagttccctaggggagaaaagcaagcttaagaattgacataaagagtaggaagttagctaatgcaacatatatcactttgttttttcacaactacagtgactttatgtatttcccagaggaaggcatacagggaagaaattatcccatttggacaaacagcatgttctcacaggaagcatttatcacacttacttgtcaactttctagaatcaaatctagtagctgacagtaccaggatcaggggtgccaaccctaagcacccccagaaagctgactggccctgtggttcccactccagacatgatgtcagctgtgaaatcgacgtcgctggaccataattaggcttctgttcttcaggagacatttgttcaaagtcatttgggcaaccatattctgaaaacagcccagccagggtgatggatcactttgcaaagatcctcaatgagctattttcaagtgatgacaaagtgtgaagttaaccgctcatttgagaactttctttttcatccaaagtaaattcaaatatgattagaaatctgaccttttattactggaattctcttgactaaaagtaaaattgaattttaattcctaaatctccatgtgtatacagtactgtgggaacatcacagattttggctccatgccctaaagagaaattggctttcagattatttggattaaaaacaaagactttcttaagagatgtaaaattttcatgatgttttcttttttgctaaaactaaagaattattcttttacatttcagtgttcctggaccacgagaacgccaacaagatcctgaacagacccaagagatacaacagcggcaagctggaagagttcgtgcagggcaacctggaacgcgagtgcatggaagagaagtgcagcttcgaagaggccagagaggtgttcgagaacaccgagagaaccaccgagttctggaagcagtacgtggacggcgaccagtgcgagagcaacccttgtctgaacggcggcagctgcaaggacgacatcaacagctacgagtgctggtgccccttcggcttcgagggcaagaactgcgagctggacgtgacctgcaacatcaagaacggcagatgcgagcagttctgcaagaacagcgccgacaacaaggtcgtgtgctcctgcaccgagggctacagactggccgagaaccagaagtcctgcgagcccgctgtgcctttcccatgcggaagagtgtccgtgtcccagaccagcaagctgaccagagccgagacagtgttccccgacgtggactacgtgaacagcaccgaggccgagacaatcctggacaacatcacccagagcacccagtccttcaacgacttcaccagagtcgtgggcggcgaggatgctaagcctggccagttcccgtggcaggtggtgctgaacggaaaggtggacgccttctgcggcggctccatcgtgaacgagaagtggatcgtgacagccgcccactgcgtggaaaccggcgtgaagatcacagtggtggccggcgagcacaacatcgaggaaaccgagcacacagagcagaaaagaaacgtgatcaggatcatcccccaccacaactacaacgccgccatcaacaagtacaaccacgatatcgccctgctggaactggacgagcccctggtgctgaatagctacgtgacccccatctgtatcgccgacaaagagtacaccaacatctttctgaagttcggcagcggctacgtgtccggctggggcagagtgtttcacaagggcagatccgctctggtgctgcagtacctgagagtgcctctggtggacagagccacctgtctgctgagcaccaagttcaccatctacaacaacatgttctgcgctggcttccacgagggcggcagagactcttgtcagggcgattctggcggccctcacgtgacagaggtggaaggcaccagctttctgaccggcatcatcagctggggcgaggaatgcgccatgaaggggaagtacggcatctacaccaaggtgtccagatacgtgaactggatcaaagaaaagaccaagctgacataatgaaagatggatttccaaggttaattcattggaattgaaaattaacagccccccccccccccccctgcagatctcgagccgaattcctgcagcccgggggatcagcctcgactgtgccttctagttgccagccatctgttgtttgcccctcccccgtgccttccttgaccctggaaggtgccactcccactgtcctttcctaataaaatgaggaaattgcatcgcattgtctgagtaggtgtcattctattctggggggtggggtggggcaggacagcaagggggaggattgggaagacaatagcaggcatgctggggatgcggtgggctctatggcttctgaggcggaaagaaccagctggggctcgagatccactagactagtgtacacgcgtgatatcagatctgttacgtagataagtagcatggcgggttaatcattaactacaaggaacccctagtgatggagttggccactccctctctgcgcgctcgctcgctcactgaggccgggcgaccaaaggtcgcccgacgcccgggctttgcccgggcggcctcagtgagcgagcgagcgcgcag

SEQ ID NO: 459 - DNA, 4410 bp, Artificial Sequence
  ITR-ApoE/C1-antitrypsin promoter-FIXss-Pro-mini Intron-human WT FIX-bGHpolyA-ITR
ctgcgcgctcgctcgctcactgaggccgcccgggcgtcgggcgacctttggtcgcccggcctcagtgagcgagcgagcgcgcagagagggagtggccaactccatcactaggggttcctggaggggtggagtcgtgacgtaaagatctgatatcatcgatcgcgatgcattaattaagcggccgaggctcagaggcacacaggagtttctgggctcaccctgcccccttccaacccctcagttcccatcctccagcagctgtttgtgtgctgcctctgaagtccacactgaacaaacttcagcctactcatgtccctaaaatgggcaaacattgcaagcagcaaacagcaaacacacagccctccctgcctgctgaccttggagctggggcagaggtcagagacctctctgggcccatgccacctccaacatccactcgaccccttggaatttcggtggagaggagcagaggttgtcctggcgtggtttaggtagtgtgagaggggtacccggggatcttgctaccagtggaacagccactaaggattctgcagtgagagcagagggccagctaagtggtactctcccagagactgtctgactcacgccaccccctccaccttggacacaggacgctgtggtttctgagccaggtacaatgactcctttcggtaagtgcagtggaagctgtacactgcccaggcaaagcgtccgggcagcgtaggcgggcgactcagatcccagccagtggacttagcccctgtttgctcctccgataactggggtgaccttggttaatattcaccagcagcctcccccgttgcccctctggatccactgcttaaatacggacgaggacagggccctgtctcctcagcttcaggcaccaccactgacctgggacagtgaatgatccccctgatctgcggcctcgacggtatcgataagcttgatatcgaattctagtcgtcgaccactttcacaatctgctagcaaaggttgccaccatgcagcgcgtgaacatgatcatggcagaatcaccaggcctcatcaccatctgccttttaggatatctactcagtgctgaatgtacaggtttgtttccttttttaaaatacattgagtatgcttgccttttagatatagaaatatctgatgctgtcttcttcactaaattttgattacatgatttgacagcaatattgaagagtctaacagccagcacgcaggttggtaagtactggttctttgttagctaggttttcttcttcttcatttttaaaactaaatagatcgacaatgcttatgatgcatttatgtttaataaacactgttcagttcatgatttggtcatgtaattcctgttagaaaacattcatctccttggtttaaaaaaattaaaagtgggaaaacaaagaaatagcagaatatagtgaaaaaaaataaccacattatttttgtttggacttaccactttgaaatcaaaatgggaaacaaaagcacaaacaatggccttatttacacaaaaagtctgattttaagatatatgacatttcaaggtttcagaagtatgtaatgaggtgtgtctctaattttttaaattatatatcttcaatttaaagttttagttaaaacataaagattaacctttcattagcaagctgttagttatcaccaaagcttttcatggattaggaaaaaatcattttgtctctatgtcaaacatcttggagttgatatttggggaaacacaatactcagttgagttccctaggggagaaaagcaagcttaagaattgacataaagagtaggaagttagctaatgcaacatatatcactttgttttttcacaactacagtgactttatgtatttcccagaggaaggcatacagggaagaaattatcccatttggacaaacagcatgttctcacaggaagcatttatcacacttacttgtcaactttctagaatcaaatctagtagctgacagtaccaggatcaggggtgccaaccctaagcacccccagaaagctgactggccctgtggttcccactccagacatgatgtcagctgtgaaatcgacgtcgctggaccataattaggcttctgttcttcaggagacatttgttcaaagtcatttgggcaaccatattctgaaaacagcccagccagggtgatggatcactttgcaaagatcctcaatgagctattttcaagtgatgacaaagtgtgaagttaaccgctcatttgagaactttctttttcatccaaagtaaattcaaatatgattagaaatctgaccttttattactggaattctcttgactaaaagtaaaattgaattttaattcctaaatctccatgtgtatacagtactgtgggaacatcacagattttggctccatgccctaaagagaaattggctttcagattatttggattaaaaacaaagactttcttaagagatgtaaaattttcatgatgttttcttttttgctaaaactaaagaattattcttttacatttcagtttttcttgatcatgaaaacgccaacaaaattctgaatcggccaaagaggtataattcaggtaaattggaagagtttgttcaagggaaccttgagagagaatgtatggaagaaaagtgtagttttgaagaagcacgagaagtttttgaaaacactgaaagaacaactgaattttggaagcagtatgttgatggagatcagtgtgagtccaatccatgtttaaatggcggcagttgcaaggatgacattaattcctatgaatgttggtgtccctttggatttgaaggaaagaactgtgaattagatgtaacatgtaacattaagaatggcagatgcgagcagttttgtaaaaatagtgctgataacaaggtggtttgctcctgtactgagggatatcgacttgcagaaaaccagaagtcctgtgaaccagcagtgccatttccatgtggaagagtttctgtttcacaaacttctaagctcacccgtgctgagactgtttttcctgatgtggactatgtaaattctactgaagctgaaaccattttggataacatcactcaaagcacccaatcatttaatgacttcactcgggttgttggtggagaagatgccaaaccaggtcaattcccttggcaggttgttttgaatggtaaagttgatgcattctgtggaggctctatcgttaatgaaaaatggattgtaactgctgcccactgtgttgaaactggtgttaaaattacagttgtcgcaggtgaacataatattgaggagacagaacatacagagcaaaagcgaaatgtgattcgaattattcctcaccacaactacaatgcagctattaataagtacaaccatgacattgcccttctggaactggacgaacccttagtgctaaacagctacgttacacctatttgcattgctgacaaggaatacacgaacatcttcctcaaatttggatctggctatgtaagtggctggggaagagtcttccacaaagggagatcagctttagttcttcagtaccttagagttccacttgttgaccgagccacatgtcttcgatctacaaagttcaccatctataacaacatgttctgtgctggcttccatgaaggaggtagagattcatgtcaaggagatagtgggggaccccatgttactgaagtggaagggaccagtttcttaactggaattattagctggggtgaagagtgtgcaatgaaaggcaaatatggaatatataccaaggtatcccggtatgtcaactggattaaggaaaaaacaaagctcacttaatgaaagatggatttccaaggttaattcattggaattgaaaattaacagccccccccccccccccctgcagatctcgagccgaattcctgcagcccgggggatcagcctcgactgtgccttctagttgccagccatctgttgtttgcccctcccccgtgccttccttgaccctggaaggtgccactcccactgtcctttcctaataaaatgaggaaattgcatcgcattgtctgagtaggtgtcattctattctggggggtggggtggggcaggacagcaagggggaggattgggaagacaatagcaggcatgctggggatgcggtgggctctatggcttctgaggcggaaagaaccagctggggctcgagatccactagactagtgtacacgcgtgatatcagatctgttacgtagataagtagcatggcgggttaatcattaactacaaggaacccctagtgatggagttggccactccctctctgcgcgctcgctcgctcactgaggccgggcgaccaaaggtcgcccgacgcccgggctttgcccgggcggcctcagtgagcgagcgagcgcgcag

SEQ ID NO: 460 - DNA, 4410 bp, Artificial Sequence
  ITR-ApoE/C1-antitrypsin promoter-FIXss-Pro-mini Intron-human FIX R318Y/R338E/T343R-bGHpolyA-ITR
ctgcgcgctcgctcgctcactgaggccgcccgggcgtcgggcgacctttggtcgcccggcctcagtgagcgagcgagcgcgcagagagggagtggccaactccatcactaggggttcctggaggggtggagtcgtgacgtaaagatctgatatcatcgatcgcgatgcattaattaagcggccgaggctcagaggcacacaggagtttctgggctcaccctgcccccttccaacccctcagttcccatcctccagcagctgtttgtgtgctgcctctgaagtccacactgaacaaacttcagcctactcatgtccctaaaatgggcaaacattgcaagcagcaaacagcaaacacacagccctccctgcctgctgaccttggagctggggcagaggtcagagacctctctgggcccatgccacctccaacatccactcgaccccttggaatttcggtggagaggagcagaggttgtcctggcgtggtttaggtagtgtgagaggggtacccggggatcttgctaccagtggaacagccactaaggattctgcagtgagagcagagggccagctaagtggtactctcccagagactgtctgactcacgccaccccctccaccttggacacaggacgctgtggtttctgagccaggtacaatgactcctttcggtaagtgcagtggaagctgtacactgcccaggcaaagcgtccgggcagcgtaggcgggcgactcagatcccagccagtggacttagcccctgtttgctcctccgataactggggtgaccttggttaatattcaccagcagcctcccccgttgcccctctggatccactgcttaaatacggacgaggacagggccctgtctcctcagcttcaggcaccaccactgacctgggacagtgaatgatccccctgatctgcggcctcgacggtatcgataagcttgatatcgaattctagtcgtcgaccactttcacaatctgctagcaaaggttgccaccatgcagcgcgtgaacatgatcatggcagaatcaccaggcctcatcaccatctgccttttaggatatctactcagtgctgaatgtacaggtttgtttccttttttaaaatacattgagtatgcttgccttttagatatagaaatatctgatgctgtcttcttcactaaattttgattacatgatttgacagcaatattgaagagtctaacagccagcacgcaggttggtaagtactggttctttgttagctaggttttcttcttcttcatttttaaaactaaatagatcgacaatgcttatgatgcatttatgtttaataaacactgttcagttcatgatttggtcatgtaattcctgttagaaaacattcatctccttggtttaaaaaaattaaaagtgggaaaacaaagaaatagcagaatatagtgaaaaaaaataaccacattatttttgtttggacttaccactttgaaatcaaaatgggaaacaaaagcacaaacaatggccttatttacacaaaaagtctgattttaagatatatgacatttcaaggtttcagaagtatgtaatgaggtgtgtctctaattttttaaattatatatcttcaatttaaagttttagttaaaacataaagattaacctttcattagcaagctgttagttatcaccaaagcttttcatggattaggaaaaaatcattttgtctctatgtcaaacatcttggagttgatatttggggaaacacaatactcagttgagttccctaggggagaaaagcaagcttaagaattgacataaagagtaggaagttagctaatgcaacatatatcactttgttttttcacaactacagtgactttatgtatttcccagaggaaggcatacagggaagaaattatcccatttggacaaacagcatgttctcacaggaagcatttatcacacttacttgtcaactttctagaatcaaatctagtagctgacagtaccaggatcaggggtgccaaccctaagcacccccagaaagctgactggccctgtggttcccactccagacatgatgtcagctgtgaaatcgacgtcgctggaccataattaggcttctgttcttcaggagacatttgttcaaagtcatttgggcaaccatattctgaaaacagcccagccagggtgatggatcactttgcaaagatcctcaatgagctattttcaagtgatgacaaagtgtgaagttaaccgctcatttgagaactttctttttcatccaaagtaaattcaaatatgattagaaatctgaccttttattactggaattctcttgactaaaagtaaaattgaattttaattcctaaatctccatgtgtatacagtactgtgggaacatcacagattttggctccatgccctaaagagaaattggctttcagattatttggattaaaaacaaagactttcttaagagatgtaaaattttcatgatgttttcttttttgctaaaactaaagaattattcttttacatttcagtttttcttgatcatgaaaacgccaacaaaattctgaatcggccaaagaggtataattcaggtaaattggaagagtttgttcaagggaaccttgagagagaatgtatggaagaaaagtgtagttttgaagaagcacgagaagtttttgaaaacactgaaagaacaactgaattttggaagcagtatgttgatggagatcagtgtgagtccaatccatgtttaaatggcggcagttgcaaggatgacattaattcctatgaatgttggtgtccctttggatttgaaggaaagaactgtgaattagatgtaacatgtaacattaagaatggcagatgcgagcagttttgtaaaaatagtgctgataacaaggtggtttgctcctgtactgagggatatcgacttgcagaaaaccagaagtcctgtgaaccagcagtgccatttccatgtggaagagtttctgtttcacaaacttctaagctcacccgtgctgagactgtttttcctgatgtggactatgtaaattctactgaagctgaaaccattttggataacatcactcaaagcacccaatcatttaatgacttcactcgggttgttggtggagaagatgccaaaccaggtcaattcccttggcaggttgttttgaatggtaaagttgatgcattctgtggaggctctatcgttaatgaaaaatggattgtaactgctgcccactgtgttgaaactggtgttaaaattacagttgtcgcaggtgaacataatattgaggagacagaacatacagagcaaaagcgaaatgtgattcgaattattcctcaccacaactacaatgcagctattaataagtacaaccatgacattgcccttctggaactggacgaacccttagtgctaaacagctacgttacacctatttgcattgctgacaaggaatacacgaacatcttcctcaaatttggatctggctatgtaagtggctggggaagagtcttccacaaagggtactcagctttagttcttcagtaccttagagttccacttgttgaccgagccacatgtcttgaatctacaaagttcaggatctataacaacatgttctgtgctggcttccatgaaggaggtagagattcatgtcaaggagatagtgggggaccccatgttactgaagtggaagggaccagtttcttaactggaattattagctggggtgaagagtgtgcaatgaaaggcaaatatggaatatataccaaggtatcccggtatgtcaactggattaaggaaaaaacaaagctcacttaatgaaagatggatttccaaggttaattcattggaattgaaaattaacagccccccccccccccccctgcagatctcgagccgaattcctgcagcccgggggatcagcctcgactgtgccttctagttgccagccatctgttgtttgcccctcccccgtgccttccttgaccctggaaggtgccactcccactgtcctttcctaataaaatgaggaaattgcatcgcattgtctgagtaggtgtcattctattctggggggtggggtggggcaggacagcaagggggaggattgggaagacaatagcaggcatgctggggatgcggtgggctctatggcttctgaggcggaaagaaccagctggggctcgagatccactagactagtgtacacgcgtgatatcagatctgttacgtagataagtagcatggcgggttaatcattaactacaaggaacccctagtgatggagttggccactccctctctgcgcgctcgctcgctcactgaggccgggcgaccaaaggtcgcccgacgcccgggctttgcccgggcggcctcagtgagcgagcgagcgcgcag

SEQ ID NO: 461 - DNA, 4410 bp, Artificial Sequence
  ITR-ApoE/C1-antitrypsin promoter-FIXss-Pro-mini Intron-human FIX R338L-bGHpolyA-ITR
ctgcgcgctcgctcgctcactgaggccgcccgggcgtcgggcgacctttggtcgcccggcctcagtgagcgagcgagcgcgcagagagggagtggccaactccatcactaggggttcctggaggggtggagtcgtgacgtaaagatctgatatcatcgatcgcgatgcattaattaagcggccgaggctcagaggcacacaggagtttctgggctcaccctgcccccttccaacccctcagttcccatcctccagcagctgtttgtgtgctgcctctgaagtccacactgaacaaacttcagcctactcatgtccctaaaatgggcaaacattgcaagcagcaaacagcaaacacacagccctccctgcctgctgaccttggagctggggcagaggtcagagacctctctgggcccatgccacctccaacatccactcgaccccttggaatttcggtggagaggagcagaggttgtcctggcgtggtttaggtagtgtgagaggggtacccggggatcttgctaccagtggaacagccactaaggattctgcagtgagagcagagggccagctaagtggtactctcccagagactgtctgactcacgccaccccctccaccttggacacaggacgctgtggtttctgagccaggtacaatgactcctttcggtaagtgcagtggaagctgtacactgcccaggcaaagcgtccgggcagcgtaggcgggcgactcagatcccagccagtggacttagcccctgtttgctcctccgataactggggtgaccttggttaatattcaccagcagcctcccccgttgcccctctggatccactgcttaaatacggacgaggacagggccctgtctcctcagcttcaggcaccaccactgacctgggacagtgaatgatccccctgatctgcggcctcgacggtatcgataagcttgatatcgaattctagtcgtcgaccactttcacaatctgctagcaaaggttgccaccatgcagcgcgtgaacatgatcatggcagaatcaccaggcctcatcaccatctgccttttaggatatctactcagtgctgaatgtacaggtttgtttccttttttaaaatacattgagtatgcttgccttttagatatagaaatatctgatgctgtcttcttcactaaattttgattacatgatttgacagcaatattgaagagtctaacagccagcacgcaggttggtaagtactggttctttgttagctaggttttcttcttcttcatttttaaaactaaatagatcgacaatgcttatgatgcatttatgtttaataaacactgttcagttcatgatttggtcatgtaattcctgttagaaaacattcatctccttggtttaaaaaaattaaaagtgggaaaacaaagaaatagcagaatatagtgaaaaaaaataaccacattatttttgtttggacttaccactttgaaatcaaaatgggaaacaaaagcacaaacaatggccttatttacacaaaaagtctgattttaagatatatgacatttcaaggtttcagaagtatgtaatgaggtgtgtctctaattttttaaattatatatcttcaatttaaagttttagttaaaacataaagattaacctttcattagcaagctgttagttatcaccaaagcttttcatggattaggaaaaaatcattttgtctctatgtcaaacatcttggagttgatatttggggaaacacaatactcagttgagttccctaggggagaaaagcaagcttaagaattgacataaagagtaggaagttagctaatgcaacatatatcactttgttttttcacaactacagtgactttatgtatttcccagaggaaggcatacagggaagaaattatcccatttggacaaacagcatgttctcacaggaagcatttatcacacttacttgtcaactttctagaatcaaatctagtagctgacagtaccaggatcaggggtgccaaccctaagcacccccagaaagctgactggccctgtggttcccactccagacatgatgtcagctgtgaaatcgacgtcgctggaccataattaggcttctgttcttcaggagacatttgttcaaagtcatttgggcaaccatattctgaaaacagcccagccagggtgatggatcactttgcaaagatcctcaatgagctattttcaagtgatgacaaagtgtgaagttaaccgctcatttgagaactttctttttcatccaaagtaaattcaaatatgattagaaatctgaccttttattactggaattctcttgactaaaagtaaaattgaattttaattcctaaatctccatgtgtatacagtactgtgggaacatcacagattttggctccatgccctaaagagaaattggctttcagattatttggattaaaaacaaagactttcttaagagatgtaaaattttcatgatgttttcttttttgctaaaactaaagaattattcttttacatttcagtttttcttgatcatgaaaacgccaacaaaattctgaatcggccaaagaggtataattcaggtaaattggaagagtttgttcaagggaaccttgagagagaatgtatggaagaaaagtgtagttttgaagaagcacgagaagtttttgaaaacactgaaagaacaactgaattttggaagcagtatgttgatggagatcagtgtgagtccaatccatgtttaaatggcggcagttgcaaggatgacattaattcctatgaatgttggtgtccctttggatttgaaggaaagaactgtgaattagatgtaacatgtaacattaagaatggcagatgcgagcagttttgtaaaaatagtgctgataacaaggtggtttgctcctgtactgagggatatcgacttgcagaaaaccagaagtcctgtgaaccagcagtgccatttccatgtggaagagtttctgtttcacaaacttctaagctcacccgtgctgagactgtttttcctgatgtggactatgtaaattctactgaagctgaaaccattttggataacatcactcaaagcacccaatcatttaatgacttcactcgggttgttggtggagaagatgccaaaccaggtcaattcccttggcaggttgttttgaatggtaaagttgatgcattctgtggaggctctatcgttaatgaaaaatggattgtaactgctgcccactgtgttgaaactggtgttaaaattacagttgtcgcaggtgaacataatattgaggagacagaacatacagagcaaaagcgaaatgtgattcgaattattcctcaccacaactacaatgcagctattaataagtacaaccatgacattgcccttctggaactggacgaacccttagtgctaaacagctacgttacacctatttgcattgctgacaaggaatacacgaacatcttcctcaaatttggatctggctatgtaagtggctggggaagagtcttccacaaagggagatcagctttagttcttcagtaccttagagttccacttgttgaccgagccacatgtcttctgtctacaaagttcaccatctataacaacatgttctgtgctggcttccatgaaggaggtagagattcatgtcaaggagatagtgggggaccccatgttactgaagtggaagggaccagtttcttaactggaattattagctggggtgaagagtgtgcaatgaaaggcaaatatggaatatataccaaggtatcccggtatgtcaactggattaaggaaaaaacaaagctcacttaatgaaagatggatttccaaggttaattcattggaattgaaaattaacagccccccccccccccccctgcagatctcgagccgaattcctgcagcccgggggatcagcctcgactgtgccttctagttgccagccatctgttgtttgcccctcccccgtgccttccttgaccctggaaggtgccactcccactgtcctttcctaataaaatgaggaaattgcatcgcattgtctgagtaggtgtcattctattctggggggtggggtggggcaggacagcaagggggaggattgggaagacaatagcaggcatgctggggatgcggtgggctctatggcttctgaggcggaaagaaccagctggggctcgagatccactagactagtgtacacgcgtgatatcagatctgttacgtagataagtagcatggcgggttaatcattaactacaaggaacccctagtgatggagttggccactccctctctgcgcgctcgctcgctcactgaggccgggcgaccaaaggtcgcccgacgcccgggctttgcccgggcggcctcagtgagcgagcgagcgcgcag

SEQ ID NO: 462 - DNA, 2824 bp, Artificial Sequence
  FIXss-Pro-mini Intron-Pro-human wild type FIX mouse optimized
atgcagcgcgtgaacatgattatggccgagagccctggcctgatcaccatctgcctgctgggctacctgctgagcgccgagtgtacaggtttgtttccttttttaaaatacattgagtatgcttgccttttagatatagaaatatctgatgctgtcttcttcactaaattttgattacatgatttgacagcaatattgaagagtctaacagccagcacgcaggttggtaagtactggttctttgttagctaggttttcttcttcttcatttttaaaactaaatagatcgacaatgcttatgatgcatttatgtttaataaacactgttcagttcatgatttggtcatgtaattcctgttagaaaacattcatctccttggtttaaaaaaattaaaagtgggaaaacaaagaaatagcagaatatagtgaaaaaaaataaccacattatttttgtttggacttaccactttgaaatcaaaatgggaaacaaaagcacaaacaatggccttatttacacaaaaagtctgattttaagatatatgacatttcaaggtttcagaagtatgtaatgaggtgtgtctctaattttttaaattatatatcttcaatttaaagttttagttaaaacataaagattaacctttcattagcaagctgttagttatcaccaaagcttttcatggattaggaaaaaatcattttgtctctatgtcaaacatcttggagttgatatttggggaaacacaatactcagttgagttccctaggggagaaaagcaagcttaagaattgacataaagagtaggaagttagctaatgcaacatatatcactttgttttttcacaactacagtgactttatgtatttcccagaggaaggcatacagggaagaaattatcccatttggacaaacagcatgttctcacaggaagcatttatcacacttacttgtcaactttctagaatcaaatctagtagctgacagtaccaggatcaggggtgccaaccctaagcacccccagaaagctgactggccctgtggttcccactccagacatgatgtcagctgtgaaatcgacgtcgctggaccataattaggcttctgttcttcaggagacatttgttcaaagtcatttgggcaaccatattctgaaaacagcccagccagggtgatggatcactttgcaaagatcctcaatgagctattttcaagtgatgacaaagtgtgaagttaaccgctcatttgagaactttctttttcatccaaagtaaattcaaatatgattagaaatctgaccttttattactggaattctcttgactaaaagtaaaattgaattttaattcctaaatctccatgtgtatacagtactgtgggaacatcacagattttggctccatgccctaaagagaaattggctttcagattatttggattaaaaacaaagactttcttaagagatgtaaaattttcatgatgttttcttttttgctaaaactaaagaattattcttttacatttcagtgttcctggaccacgagaacgccaacaagatcctgaacagacccaagagatacaacagcggcaagctggaagagttcgtgcagggcaacctggaacgcgagtgcatggaagagaagtgcagcttcgaagaggccagagaggtgttcgagaacaccgagagaaccaccgagttctggaagcagtacgtggacggcgaccagtgcgagagcaacccttgtctgaacggcggcagctgcaaggacgacatcaacagctacgagtgctggtgccccttcggcttcgagggcaagaactgcgagctggacgtgacctgcaacatcaagaacggcagatgcgagcagttctgcaagaacagcgccgacaacaaggtcgtgtgctcctgcaccgagggctacagactggccgagaaccagaagtcctgcgagcccgctgtgcctttcccatgcggaagagtgtccgtgtcccagaccagcaagctgaccagagccgagacagtgttccccgacgtggactacgtgaacagcaccgaggccgagacaatcctggacaacatcacccagagcacccagtccttcaacgacttcaccagagtcgtgggcggcgaggatgctaagcctggccagttcccgtggcaggtggtgctgaacggaaaggtggacgccttctgcggcggctccatcgtgaacgagaagtggatcgtgacagccgcccactgcgtggaaaccggcgtgaagatcacagtggtggccggcgagcacaacatcgaggaaaccgagcacacagagcagaaaagaaacgtgatcaggatcatcccccaccacaactacaacgccgccatcaacaagtacaaccacgatatcgccctgctggaactggacgagcccctggtgctgaatagctacgtgacccccatctgtatcgccgacaaagagtacaccaacatctttctgaagttcggcagcggctacgtgtccggctggggcagagtgtttcacaagggcagatccgctctggtgctgcagtacctgagagtgcctctggtggacagagccacctgtctgagaagcaccaagttcaccatctacaacaacatgttctgcgctggcttccacgagggcggcagagactcttgtcagggcgattctggcggccctcacgtgacagaggtggaaggcaccagctttctgaccggcatcatcagctggggcgaggaatgcgccatgaaggggaagtacggcatctacaccaaggtgtccagatacgtgaactggatcaaagaaaagaccaagctgacataa

SEQ ID NO: 463 - DNA, 2824 bp, Artificial Sequence
  FIXss-Pro-mini Intron-Pro-human FIX R318Y/R338E/T343R mouse optimized
atgcagcgcgtgaacatgattatggccgagagccctggcctgatcaccatctgcctgctgggctacctgctgagcgccgagtgtacaggtttgtttccttttttaaaatacattgagtatgcttgccttttagatatagaaatatctgatgctgtcttcttcactaaattttgattacatgatttgacagcaatattgaagagtctaacagccagcacgcaggttggtaagtactggttctttgttagctaggttttcttcttcttcatttttaaaactaaatagatcgacaatgcttatgatgcatttatgtttaataaacactgttcagttcatgatttggtcatgtaattcctgttagaaaacattcatctccttggtttaaaaaaattaaaagtgggaaaacaaagaaatagcagaatatagtgaaaaaaaataaccacattatttttgtttggacttaccactttgaaatcaaaatgggaaacaaaagcacaaacaatggccttatttacacaaaaagtctgattttaagatatatgacatttcaaggtttcagaagtatgtaatgaggtgtgtctctaattttttaaattatatatcttcaatttaaagttttagttaaaacataaagattaacctttcattagcaagctgttagttatcaccaaagcttttcatggattaggaaaaaatcattttgtctctatgtcaaacatcttggagttgatatttggggaaacacaatactcagttgagttccctaggggagaaaagcaagcttaagaattgacataaagagtaggaagttagctaatgcaacatatatcactttgttttttcacaactacagtgactttatgtatttcccagaggaaggcatacagggaagaaattatcccatttggacaaacagcatgttctcacaggaagcatttatcacacttacttgtcaactttctagaatcaaatctagtagctgacagtaccaggatcaggggtgccaaccctaagcacccccagaaagctgactggccctgtggttcccactccagacatgatgtcagctgtgaaatcgacgtcgctggaccataattaggcttctgttcttcaggagacatttgttcaaagtcatttgggcaaccatattctgaaaacagcccagccagggtgatggatcactttgcaaagatcctcaatgagctattttcaagtgatgacaaagtgtgaagttaaccgctcatttgagaactttctttttcatccaaagtaaattcaaatatgattagaaatctgaccttttattactggaattctcttgactaaaagtaaaattgaattttaattcctaaatctccatgtgtatacagtactgtgggaacatcacagattttggctccatgccctaaagagaaattggctttcagattatttggattaaaaacaaagactttcttaagagatgtaaaattttcatgatgttttcttttttgctaaaactaaagaattattcttttacatttcagtgttcctggaccacgagaacgccaacaagatcctgaacagacccaagagatacaacagcggcaagctggaagagttcgtgcagggcaacctggaacgcgagtgcatggaagagaagtgcagcttcgaagaggccagagaggtgttcgagaacaccgagagaaccaccgagttctggaagcagtacgtggacggcgaccagtgcgagagcaacccttgtctgaacggcggcagctgcaaggacgacatcaacagctacgagtgctggtgccccttcggcttcgagggcaagaactgcgagctggacgtgacctgcaacatcaagaacggcagatgcgagcagttctgcaagaacagcgccgacaacaaggtcgtgtgctcctgcaccgagggctacagactggccgagaaccagaagtcctgcgagcccgctgtgcctttcccatgcggaagagtgtccgtgtcccagaccagcaagctgaccagagccgagacagtgttccccgacgtggactacgtgaacagcaccgaggccgagacaatcctggacaacatcacccagagcacccagtccttcaacgacttcaccagagtcgtgggcggcgaggatgctaagcctggccagttcccgtggcaggtggtgctgaacggaaaggtggacgccttctgcggcggctccatcgtgaacgagaagtggatcgtgacagccgcccactgcgtggaaaccggcgtgaagatcacagtggtggccggcgagcacaacatcgaggaaaccgagcacacagagcagaaaagaaacgtgatcaggatcatcccccaccacaactacaacgccgccatcaacaagtacaaccacgatatcgccctgctggaactggacgagcccctggtgctgaatagctacgtgacccccatctgtatcgccgacaaagagtacaccaacatctttctgaagttcggcagcggctacgtgtccggctggggcagagtgtttcacaagggctactccgctctggtgctgcagtacctgagagtgcctctggtggacagagccacctgtctggaaagcaccaagttcagaatctacaacaacatgttctgcgctggcttccacgagggcggcagagactcttgtcagggcgattctggcggccctcacgtgacagaggtggaaggcaccagctttctgaccggcatcatcagctggggcgaggaatgcgccatgaaggggaagtacggcatctacaccaaggtgtccagatacgtgaactggatcaaagaaaagaccaagctgacataa

SEQ ID NO: 464 - DNA, 2824 bp, Artificial Sequence
  FIXss-Pro-mini Intron-Pro-human FIX R338L mouse optimized
atgcagcgcgtgaacatgattatggccgagagccctggcctgatcaccatctgcctgctgggctacctgctgagcgccgagtgtacaggtttgtttccttttttaaaatacattgagtatgcttgccttttagatatagaaatatctgatgctgtcttcttcactaaattttgattacatgatttgacagcaatattgaagagtctaacagccagcacgcaggttggtaagtactggttctttgttagctaggttttcttcttcttcatttttaaaactaaatagatcgacaatgcttatgatgcatttatgtttaataaacactgttcagttcatgatttggtcatgtaattcctgttagaaaacattcatctccttggtttaaaaaaattaaaagtgggaaaacaaagaaatagcagaatatagtgaaaaaaaataaccacattatttttgtttggacttaccactttgaaatcaaaatgggaaacaaaagcacaaacaatggccttatttacacaaaaagtctgattttaagatatatgacatttcaaggtttcagaagtatgtaatgaggtgtgtctctaattttttaaattatatatcttcaatttaaagttttagttaaaacataaagattaacctttcattagcaagctgttagttatcaccaaagcttttcatggattaggaaaaaatcattttgtctctatgtcaaacatcttggagttgatatttggggaaacacaatactcagttgagttccctaggggagaaaagcaagcttaagaattgacataaagagtaggaagttagctaatgcaacatatatcactttgttttttcacaactacagtgactttatgtatttcccagaggaaggcatacagggaagaaattatcccatttggacaaacagcatgttctcacaggaagcatttatcacacttacttgtcaactttctagaatcaaatctagtagctgacagtaccaggatcaggggtgccaaccctaagcacccccagaaagctgactggccctgtggttcccactccagacatgatgtcagctgtgaaatcgacgtcgctggaccataattaggcttctgttcttcaggagacatttgttcaaagtcatttgggcaaccatattctgaaaacagcccagccagggtgatggatcactttgcaaagatcctcaatgagctattttcaagtgatgacaaagtgtgaagttaaccgctcatttgagaactttctttttcatccaaagtaaattcaaatatgattagaaatctgaccttttattactggaattctcttgactaaaagtaaaattgaattttaattcctaaatctccatgtgtatacagtactgtgggaacatcacagattttggctccatgccctaaagagaaattggctttcagattatttggattaaaaacaaagactttcttaagagatgtaaaattttcatgatgttttcttttttgctaaaactaaagaattattcttttacatttcagtgttcctggaccacgagaacgccaacaagatcctgaacagacccaagagatacaacagcggcaagctggaagagttcgtgcagggcaacctggaacgcgagtgcatggaagagaagtgcagcttcgaagaggccagagaggtgttcgagaacaccgagagaaccaccgagttctggaagcagtacgtggacggcgaccagtgcgagagcaacccttgtctgaacggcggcagctgcaaggacgacatcaacagctacgagtgctggtgccccttcggcttcgagggcaagaactgcgagctggacgtgacctgcaacatcaagaacggcagatgcgagcagttctgcaagaacagcgccgacaacaaggtcgtgtgctcctgcaccgagggctacagactggccgagaaccagaagtcctgcgagcccgctgtgcctttcccatgcggaagagtgtccgtgtcccagaccagcaagctgaccagagccgagacagtgttccccgacgtggactacgtgaacagcaccgaggccgagacaatcctggacaacatcacccagagcacccagtccttcaacgacttcaccagagtcgtgggcggcgaggatgctaagcctggccagttcccgtggcaggtggtgctgaacggaaaggtggacgccttctgcggcggctccatcgtgaacgagaagtggatcgtgacagccgcccactgcgtggaaaccggcgtgaagatcacagtggtggccggcgagcacaacatcgaggaaaccgagcacacagagcagaaaagaaacgtgatcaggatcatcccccaccacaactacaacgccgccatcaacaagtacaaccacgatatcgccctgctggaactggacgagcccctggtgctgaatagctacgtgacccccatctgtatcgccgacaaagagtacaccaacatctttctgaagttcggcagcggctacgtgtccggctggggcagagtgtttcacaagggcagatccgctctggtgctgcagtacctgagagtgcctctggtggacagagccacctgtctgctgagcaccaagttcaccatctacaacaacatgttctgcgctggcttccacgagggcggcagagactcttgtcagggcgattctggcggccctcacgtgacagaggtggaaggcaccagctttctgaccggcatcatcagctggggcgaggaatgcgccatgaaggggaagtacggcatctacaccaaggtgtccagatacgtgaactggatcaaagaaaagaccaagctgacataa

SEQ ID NO: 465 - DNA, 2821 bp, Artificial Sequence
  FIXss-Pro-mini Intron-Pro-human wild-type FIX
atgcagcgcgtgaacatgatcatggcagaatcaccaggcctcatcaccatctgccttttaggatatctactcagtgctgaatgtacaggtttgtttccttttttaaaatacattgagtatgcttgccttttagatatagaaatatctgatgctgtcttcttcactaaattttgattacatgatttgacagcaatattgaagagtctaacagccagcacgcaggttggtaagtactggttctttgttagctaggttttcttcttcttcatttttaaaactaaatagatcgacaatgcttatgatgcatttatgtttaataaacactgttcagttcatgatttggtcatgtaattcctgttagaaaacattcatctccttggtttaaaaaaattaaaagtgggaaaacaaagaaatagcagaatatagtgaaaaaaaataaccacattatttttgtttggacttaccactttgaaatcaaaatgggaaacaaaagcacaaacaatggccttatttacacaaaaagtctgattttaagatatatgacatttcaaggtttcagaagtatgtaatgaggtgtgtctctaattttttaaattatatatcttcaatttaaagttttagttaaaacataaagattaacctttcattagcaagctgttagttatcaccaaagcttttcatggattaggaaaaaatcattttgtctctatgtcaaacatcttggagttgatatttggggaaacacaatactcagttgagttccctaggggagaaaagcaagcttaagaattgacataaagagtaggaagttagctaatgcaacatatatcactttgttttttcacaactacagtgactttatgtatttcccagaggaaggcatacagggaagaaattatcccatttggacaaacagcatgttctcacaggaagcatttatcacacttacttgtcaactttctagaatcaaatctagtagctgacagtaccaggatcaggggtgccaaccctaagcacccccagaaagctgactggccctgtggttcccactccagacatgatgtcagctgtgaaatcgacgtcgctggaccataattaggcttctgttcttcaggagacatttgttcaaagtcatttgggcaaccatattctgaaaacagcccagccagggtgatggatcactttgcaaagatcctcaatgagctattttcaagtgatgacaaagtgtgaagttaaccgctcatttgagaactttctttttcatccaaagtaaattcaaatatgattagaaatctgaccttttattactggaattctcttgactaaaagtaaaattgaattttaattcctaaatctccatgtgtatacagtactgtgggaacatcacagattttggctccatgccctaaagagaaattggctttcagattatttggattaaaaacaaagactttcttaagagatgtaaaattttcatgatgttttcttttttgctaaaactaaagaattattcttttacatttcagtttttcttgatcatgaaaacgccaacaaaattctgaatcggccaaagaggtataattcaggtaaattggaagagtttgttcaagggaaccttgagagagaatgtatggaagaaaagtgtagttttgaagaagcacgagaagtttttgaaaacactgaaagaacaactgaattttggaagcagtatgttgatggagatcagtgtgagtccaatccatgtttaaatggcggcagttgcaaggatgacattaattcctatgaatgttggtgtccctttggatttgaaggaaagaactgtgaattagatgtaacatgtaacattaagaatggcagatgcgagcagttttgtaaaaatagtgctgataacaaggtggtttgctcctgtactgagggatatcgacttgcagaaaaccagaagtcctgtgaaccagcagtgccatttccatgtggaagagtttctgtttcacaaacttctaagctcacccgtgctgagactgtttttcctgatgtggactatgtaaattctactgaagctgaaaccattttggataacatcactcaaagcacccaatcatttaatgacttcactcgggttgttggtggagaagatgccaaaccaggtcaattcccttggcaggttgttttgaatggtaaagttgatgcattctgtggaggctctatcgttaatgaaaaatggattgtaactgctgcccactgtgttgaaactggtgttaaaattacagttgtcgcaggtgaacataatattgaggagacagaacatacagagcaaaagcgaaatgtgattcgaattattcctcaccacaactacaatgcagctattaataagtacaaccatgacattgcccttctggaactggacgaacccttagtgctaaacagctacgttacacctatttgcattgctgacaaggaatacacgaacatcttcctcaaatttggatctggctatgtaagtggctggggaagagtcttccacaaagggagatcagctttagttcttcagtaccttagagttccacttgttgaccgagccacatgtcttcgatctacaaagttcaccatctataacaacatgttctgtgctggcttccatgaaggaggtagagattcatgtcaaggagatagtgggggaccccatgttactgaagtggaagggaccagtttcttaactggaattattagctggggtgaagagtgtgcaatgaaaggcaaatatggaatatataccaaggtatcccggtatgtcaactggattaaggaaaaaacaaagctcact

SEQ ID NO: 466 - DNA, 2821 bp, Artificial Sequence; identical to SEQ ID NO: 465
  FIXss-Pro-mini Intron-Pro-human FIX R318Y/R338E/T343R

SEQ ID NO: 467 - DNA, 2821 bp, Artificial Sequence
  FIXss-Pro-mini Intron-Pro-human FIX R338L
atgcagcgcgtgaacatgatcatggcagaatcaccaggcctcatcaccatctgccttttaggatatctactcagtgctgaatgtacaggtttgtttccttttttaaaatacattgagtatgcttgccttttagatatagaaatatctgatgctgtcttcttcactaaattttgattacatgatttgacagcaatattgaagagtctaacagccagcacgcaggttggtaagtactggttctttgttagctaggttttcttcttcttcatttttaaaactaaatagatcgacaatgcttatgatgcatttatgtttaataaacactgttcagttcatgatttggtcatgtaattcctgttagaaaacattcatctccttggtttaaaaaaattaaaagtgggaaaacaaagaaatagcagaatatagtgaaaaaaaataaccacattatttttgtttggacttaccactttgaaatcaaaatgggaaacaaaagcacaaacaatggccttatttacacaaaaagtctgattttaagatatatgacatttcaaggtttcagaagtatgtaatgaggtgtgtctctaattttttaaattatatatcttcaatttaaagttttagttaaaacataaagattaacctttcattagcaagctgttagttatcaccaaagcttttcatggattaggaaaaaatcattttgtctctatgtcaaacatcttggagttgatatttggggaaacacaatactcagttgagttccctaggggagaaaagcaagcttaagaattgacataaagagtaggaagttagctaatgcaacatatatcactttgttttttcacaactacagtgactttatgtatttcccagaggaaggcatacagggaagaaattatcccatttggacaaacagcatgttctcacaggaagcatttatcacacttacttgtcaactttctagaatcaaatctagtagctgacagtaccaggatcaggggtgccaaccctaagcacccccagaaagctgactggccctgtggttcccactccagacatgatgtcagctgtgaaatcgacgtcgctggaccataattaggcttctgttcttcaggagacatttgttcaaagtcatttgggcaaccatattctgaaaacagcccagccagggtgatggatcactttgcaaagatcctcaatgagctattttcaagtgatgacaaagtgtgaagttaaccgctcatttgagaactttctttttcatccaaagtaaattcaaatatgattagaaatctgaccttttattactggaattctcttgactaaaagtaaaattgaattttaattcctaaatctccatgtgtatacagtactgtgggaacatcacagattttggctccatgccctaaagagaaattggctttcagattatttggattaaaaacaaagactttcttaagagatgtaaaattttcatgatgttttcttttttgctaaaactaaagaattattcttttacatttcagtttttcttgatcatgaaaacgccaacaaaattctgaatcggccaaagaggtataattcaggtaaattggaagagtttgttcaagggaaccttgagagagaatgtatggaagaaaagtgtagttttgaagaagcacgagaagtttttgaaaacactgaaagaacaactgaattttggaagcagtatgttgatggagatcagtgtgagtccaatccatgtttaaatggcggcagttgcaaggatgacattaattcctatgaatgttggtgtccctttggatttgaaggaaagaactgtgaattagatgtaacatgtaacattaagaatggcagatgcgagcagttttgtaaaaatagtgctgataacaaggtggtttgctcctgtactgagggatatcgacttgcagaaaaccagaagtcctgtgaaccagcagtgccatttccatgtggaagagtttctgtttcacaaacttctaagctcacccgtgctgagactgtttttcctgatgtggactatgtaaattctactgaagctgaaaccattttggataacatcactcaaagcacccaatcatttaatgacttcactcgggttgttggtggagaagatgccaaaccaggtcaattcccttggcaggttgttttgaatggtaaagttgatgcattctgtggaggctctatcgttaatgaaaaatggattgtaactgctgcccactgtgttgaaactggtgttaaaattacagttgtcgcaggtgaacataatattgaggagacagaacatacagagcaaaagcgaaatgtgattcgaattattcctcaccacaactacaatgcagctattaataagtacaaccatgacattgcccttctggaactggacgaacccttagtgctaaacagctacgttacacctatttgcattgctgacaaggaatacacgaacatcttcctcaaatttggatctggctatgtaagtggctggggaagagtcttccacaaagggagatcagctttagttcttcagtaccttagagttccacttgttgaccgagccacatgtcttctgtctacaaagttcaccatctataacaacatgttctgtgctggcttccatgaaggaggtagagattcatgtcaaggagatagtgggggaccccatgttactgaagtggaagggaccagtttcttaactggaattattagctggggtgaagagtgtgcaatgaaaggcaaatatggaatatataccaaggtatcccggtatgtcaactggattaaggaaaaaacaaagctcact

SEQ ID NO: 468 - DNA, 1383 bp, Artificial Sequence
  human FIX R318Y/R338E/T343R precursor
atgcagcgcgtgaacatgatcatggcagaatcaccaggcctcatcaccatctgccttttaggatatctactcagtgctgaatgtacagtttttcttgatcatgaaaacgccaacaaaattctgaatcggccaaagaggtataattcaggtaaattggaagagtttgttcaagggaaccttgagagagaatgtatggaagaaaagtgtagttttgaagaagcacgagaagtttttgaaaacactgaaagaacaactgaattttggaagcagtatgttgatggagatcagtgtgagtccaatccatgtttaaatggcggcagttgcaaggatgacattaattcctatgaatgttggtgtccctttggatttgaaggaaagaactgtgaattagatgtaacatgtaacattaagaatggcagatgcgagcagttttgtaaaaatagtgctgataacaaggtggtttgctcctgtactgagggatatcgacttgcagaaaaccagaagtcctgtgaaccagcagtgccatttccatgtggaagagtttctgtttcacaaacttctaagctcacccgtgctgagactgtttttcctgatgtggactatgtaaattctactgaagctgaaaccattttggataacatcactcaaagcacccaatcatttaatgacttcactcgggttgttggtggagaagatgccaaaccaggtcaattcccttggcaggttgttttgaatggtaaagttgatgcattctgtggaggctctatcgttaatgaaaaatggattgtaactgctgcccactgtgttgaaactggtgttaaaattacagttgtcgcaggtgaacataatattgaggagacagaacatacagagcaaaagcgaaatgtgattcgaattattcctcaccacaactacaatgcagctattaataagtacaaccatgacattgcccttctggaactggacgaacccttagtgctaaacagctacgttacacctatttgcattgctgacaaggaatacacgaacatcttcctcaaatttggatctggctatgtaagtggctggggaagagtcttccacaaagggtactcagctttagttcttcagtaccttagagttccacttgttgaccgagccacatgtcttgaatctacaaagttcaggatctataacaacatgttctgtgctggcttccatgaaggaggtagagattcatgtcaaggagatagtgggggaccccatgttactgaagtggaagggaccagtttcttaactggaattattagctggggtgaagagtgtgcaatgaaaggcaaatatggaatatataccaaggtatcccggtatgtcaactggattaaggaaaaaacaaagctcact

SEQ ID NO: 469 - DNA, 1383 bp, Artificial Sequence
  human FIX R338L precursor
atgcagcgcgtgaacatgatcatggcagaatcaccaggcctcatcaccatctgccttttaggatatctactcagtgctgaatgtacagtttttcttgatcatgaaaacgccaacaaaattctgaatcggccaaagaggtataattcaggtaaattggaagagtttgttcaagggaaccttgagagagaatgtatggaagaaaagtgtagttttgaagaagcacgagaagtttttgaaaacactgaaagaacaactgaattttggaagcagtatgttgatggagatcagtgtgagtccaatccatgtttaaatggcggcagttgcaaggatgacattaattcctatgaatgttggtgtccctttggatttgaaggaaagaactgtgaattagatgtaacatgtaacattaagaatggcagatgcgagcagttttgtaaaaatagtgctgataacaaggtggtttgctcctgtactgagggatatcgacttgcagaaaaccagaagtcctgtgaaccagcagtgccatttccatgtggaagagtttctgtttcacaaacttctaagctcacccgtgctgagactgtttttcctgatgtggactatgtaaattctactgaagctgaaaccattttggataacatcactcaaagcacccaatcatttaatgacttcactcgggttgttggtggagaagatgccaaaccaggtcaattcccttggcaggttgttttgaatggtaaagttgatgcattctgtggaggctctatcgttaatgaaaaatggattgtaactgctgcccactgtgttgaaactggtgttaaaattacagttgtcgcaggtgaacataatattgaggagacagaacatacagagcaaaagcgaaatgtgattcgaattattcctcaccacaactacaatgcagctattaataagtacaaccatgacattgcccttctggaactggacgaacccttagtgctaaacagctacgttacacctatttgcattgctgacaaggaatacacgaacatcttcctcaaatttggatctggctatgtaagtggctggggaagagtcttccacaaagggagatcagctttagttcttcagtaccttagagttccacttgttgaccgagccacatgtcttctgtctacaaagttcaccatctataacaacatgttctgtgctggcttccatgaaggaggtagagattcatgtcaaggagatagtgggggaccccatgttactgaagtggaagggaccagtttcttaactggaattattagctggggtgaagagtgtgcaatgaaaggcaaatatggaatatataccaaggtatcccggtatgtcaactggattaaggaaaaaacaaagctcact

SEQ ID NO: 470 - protein, 461 aa, Artificial Sequence
  human FIX R318Y/R338E/T343R precursor
MQRVNMIMAESPGLITICLLGYLLSAECTVFLDHENANKILNRPKRYNSGKLEEFVQGNLERECMEEKCSFEEAREVFENTERTTEFWKQYVDGDQCESNPCLNGGSCKDDINSYECWCPFGFEGKNCELDVTCNIKNGRCEQFCKNSADNKVVCSCTEGYRLAENQKSCEPAVPFPCGRVSVSQTSKLTRAETVFPDVDYVNSTEAETILDNITQSTQSFNDFTRVVGGEDAKPGQFPWQVVLNGKVDAFCGGSIVNEKWIVTAAHCVETGVKITVVAGEHNIEETEHTEQKRNVIRIIPHHNYNAAINKYNHDIALLELDEPLVLNSYVTPICIADKEYTNIFLKFGSGYVSGWGRVFHKGYSALVLQYLRVPLVDRATCLESTKFRIYNNMFCAGFHEGGRDSCQGDSGGPHVTEVEGTSFLTGIISWGEECAMKGKYGIYTKVSRYVNWIKEKTKLT

SEQ ID NO: 471 - protein, 461 aa, Artificial Sequence
  human FIX R338L precursor
MQRVNMIMAESPGLITICLLGYLLSAECTVFLDHENANKILNRPKRYNSGKLEEFVQGNLERECMEEKCSFEEAREVFENTERTTEFWKQYVDGDQCESNPCLNGGSCKDDINSYECWCPFGFEGKNCELDVTCNIKNGRCEQFCKNSADNKVVCSCTEGYRLAENQKSCEPAVPFPCGRVSVSQTSKLTRAETVFPDVDYVNSTEAETILDNITQSTQSFNDFTRVVGGEDAKPGQFPWQVVLNGKVDAFCGGSIVNEKWIVTAAHCVETGVKITVVAGEHNIEETEHTEQKRNVIRIIPHHNYNAAINKYNHDIALLELDEPLVLNSYVTPICIADKEYTNIFLKFGSGYVSGWGRVFHKGRSALVLQYLRVPLVDRATCLLSTKFTIYNNMFCAGFHEGGRDSCQGDSGGPHVTEVEGTSFLTGIISWGEECAMKGKYGIYTKVSRYVNWIKEKTKLT

SEQ ID NO: 472 - DNA, 1296 bp, Artificial Sequence
  human wild type FIX propeptide-mature
gtttttcttgatcatgaaaacgccaacaaaattctgaatcggccaaagaggtataattcaggtaaattggaagagtttgttcaagggaaccttgagagagaatgtatggaagaaaagtgtagttttgaagaagcacgagaagtttttgaaaacactgaaagaacaactgaattttggaagcagtatgttgatggagatcagtgtgagtccaatccatgtttaaatggcggcagttgcaaggatgacattaattcctatgaatgttggtgtccctttggatttgaaggaaagaactgtgaattagatgtaacatgtaacattaagaatggcagatgcgagcagttttgtaaaaatagtgctgataacaaggtggtttgctcctgtactgagggatatcgacttgcagaaaaccagaagtcctgtgaaccagcagtgccatttccatgtggaagagtttctgtttcacaaacttctaagctcacccgtgctgagactgtttttcctgatgtggactatgtaaattctactgaagctgaaaccattttggataacatcactcaaagcacccaatcatttaatgacttcactcgggttgttggtggagaagatgccaaaccaggtcaattcccttggcaggttgttttgaatggtaaagttgatgcattctgtggaggctctatcgttaatgaaaaatggattgtaactgctgcccactgtgttgaaactggtgttaaaattacagttgtcgcaggtgaacataatattgaggagacagaacatacagagcaaaagcgaaatgtgattcgaattattcctcaccacaactacaatgcagctattaataagtacaaccatgacattgcccttctggaactggacgaacccttagtgctaaacagctacgttacacctatttgcattgctgacaaggaatacacgaacatcttcctcaaatttggatctggctatgtaagtggctggggaagagtcttccacaaagggagatcagctttagttcttcagtaccttagagttccacttgttgaccgagccacatgtcttcgatctacaaagttcaccatctataacaacatgttctgtgctggcttccatgaaggaggtagagattcatgtcaaggagatagtgggggaccccatgttactgaagtggaagggaccagtttcttaactggaattattagctggggtgaagagtgtgcaatgaaaggcaaatatggaatatataccaaggtatcccggtatgtcaactggattaaggaaaaaacaaagctcact

SEQ ID NO: 473 - DNA, 1296 bp, Artificial Sequence
  human FIX R318Y/R338E/T343R propeptide-mature
gtttttcttgatcatgaaaacgccaacaaaattctgaatcggccaaagaggtataattcaggtaaattggaagagtttgttcaagggaaccttgagagagaatgtatggaagaaaagtgtagttttgaagaagcacgagaagtttttgaaaacactgaaagaacaactgaattttggaagcagtatgttgatggagatcagtgtgagtccaatccatgtttaaatggcggcagttgcaaggatgacattaattcctatgaatgttggtgtccctttggatttgaaggaaagaactgtgaattagatgtaacatgtaacattaagaatggcagatgcgagcagttttgtaaaaatagtgctgataacaaggtggtttgctcctgtactgagggatatcgacttgcagaaaaccagaagtcctgtgaaccagcagtgccatttccatgtggaagagtttctgtttcacaaacttctaagctcacccgtgctgagactgtttttcctgatgtggactatgtaaattctactgaagctgaaaccattttggataacatcactcaaagcacccaatcatttaatgacttcactcgggttgttggtggagaagatgccaaaccaggtcaattcccttggcaggttgttttgaatggtaaagttgatgcattctgtggaggctctatcgttaatgaaaaatggattgtaactgctgcccactgtgttgaaactggtgttaaaattacagttgtcgcaggtgaacataatattgaggagacagaacatacagagcaaaagcgaaatgtgattcgaattattcctcaccacaactacaatgcagctattaataagtacaaccatgacattgcccttctggaactggacgaacccttagtgctaaacagctacgttacacctatttgcattgctgacaaggaatacacgaacatcttcctcaaatttggatctggctatgtaagtggctggggaagagtcttccacaaagggtactcagctttagttcttcagtaccttagagttccacttgttgaccgagccacatgtcttgaatctacaaagttcaggatctataacaacatgttctgtgctggcttccatgaaggaggtagagattcatgtcaaggagatagtgggggaccccatgttactgaagtggaagggaccagtttcttaactggaattattagctggggtgaagagtgtgcaatgaaaggcaaatatggaatatataccaaggtatcccggtatgtcaactggattaaggaaaaaacaaagctcact

SEQ ID NO: 474 - DNA, 1296 bp, Artificial Sequence
  human FIX R338L propeptide-mature
gtttttcttgatcatgaaaacgccaacaaaattctgaatcggccaaagaggtataattcaggtaaattggaagagtttgttcaagggaaccttgagagagaatgtatggaagaaaagtgtagttttgaagaagcacgagaagtttttgaaaacactgaaagaacaactgaattttggaagcagtatgttgatggagatcagtgtgagtccaatccatgtttaaatggcggcagttgcaaggatgacattaattcctatgaatgttggtgtccctttggatttgaaggaaagaactgtgaattagatgtaacatgtaacattaagaatggcagatgcgagcagttttgtaaaaatagtgctgataacaaggtggtttgctcctgtactgagggatatcgacttgcagaaaaccagaagtcctgtgaaccagcagtgccatttccatgtggaagagtttctgtttcacaaacttctaagctcacccgtgctgagactgtttttcctgatgtggactatgtaaattctactgaagctgaaaccattttggataacatcactcaaagcacccaatcatttaatgacttcactcgggttgttggtggagaagatgccaaaccaggtcaattcccttggcaggttgttttgaatggtaaagttgatgcattctgtggaggctctatcgttaatgaaaaatggattgtaactgctgcccactgtgttgaaactggtgttaaaattacagttgtcgcaggtgaacataatattgaggagacagaacatacagagcaaaagcgaaatgtgattcgaattattcctcaccacaactacaatgcagctattaataagtacaaccatgacattgcccttctggaactggacgaacccttagtgctaaacagctacgttacacctatttgcattgctgacaaggaatacacgaacatcttcctcaaatttggatctggctatgtaagtggctggggaagagtcttccacaaagggagatcagctttagttcttcagtaccttagagttccacttgttgaccgagccacatgtcttctgtctacaaagttcaccatctataacaacatgttctgtgctggcttccatgaaggaggtagagattcatgtcaaggagatagtgggggaccccatgttactgaagtggaagggaccagtttcttaactggaattattagctggggtgaagagtgtgcaatgaaaggcaaatatggaatatataccaaggtatcccggtatgtcaactggattaaggaaaaaacaaagctcact

SEQ ID NO: 475 - DNA, 1296 bp, Artificial Sequence
  human FIX T148A/R318Y/R338E/T343R propeptide-mature
gtttttcttgatcatgaaaacgccaacaaaattctgaatcggccaaagaggtataattcaggtaaattggaagagtttgttcaagggaaccttgagagagaatgtatggaagaaaagtgtagttttgaagaagcacgagaagtttttgaaaacactgaaagaacaactgaattttggaagcagtatgttgatggagatcagtgtgagtccaatccatgtttaaatggcggcagttgcaaggatgacattaattcctatgaatgttggtgtccctttggatttgaaggaaagaactgtgaattagatgtaacatgtaacattaagaatggcagatgcgagcagttttgtaaaaatagtgctgataacaaggtggtttgctcctgtactgagggatatcgacttgcagaaaaccagaagtcctgtgaaccagcagtgccatttccatgtggaagagtttctgtttcacaaacttctaagctcacccgtgctgaggctgtttttcctgatgtggactatgtaaattctactgaagctgaaaccattttggataacatcactcaaagcacccaatcatttaatgacttcactcgggttgttggtggagaagatgccaaaccaggtcaattcccttggcaggttgttttgaatggtaaagttgatgcattctgtggaggctctatcgttaatgaaaaatggattgtaactgctgcccactgtgttgaaactggtgttaaaattacagttgtcgcaggtgaacataatattgaggagacagaacatacagagcaaaagcgaaatgtgattcgaattattcctcaccacaactacaatgcagctattaataagtacaaccatgacattgcccttctggaactggacgaacccttagtgctaaacagctacgttacacctatttgcattgctgacaaggaatacacgaacatcttcctcaaatttggatctggctatgtaagtggctggggaagagtcttccacaaagggtactcagctttagttcttcagtaccttagagttccacttgttgaccgagccacatgtcttgaatctacaaagttcaggatctataacaacatgttctgtgctggcttccatgaaggaggtagagattcatgtcaaggagatagtgggggaccccatgttactgaagtggaagggaccagtttcttaactggaattattagctggggtgaagagtgtgcaatgaaaggcaaatatggaatatataccaaggtatcccggtatgtcaactggattaaggaaaaaacaaagctcact

SEQ ID NO: 476 - DNA, 1296 bp, Artificial Sequence
  human FIX T148A/R338L propeptide-mature
gtttttcttgatcatgaaaacgccaacaaaattctgaatcggccaaagaggtataattcaggtaaattggaagagtttgttcaagggaaccttgagagagaatgtatggaagaaaagtgtagttttgaagaagcacgagaagtttttgaaaacactgaaagaacaactgaattttggaagcagtatgttgatggagatcagtgtgagtccaatccatgtttaaatggcggcagttgcaaggatgacattaattcctatgaatgttggtgtccctttggatttgaaggaaagaactgtgaattagatgtaacatgtaacattaagaatggcagatgcgagcagttttgtaaaaatagtgctgataacaaggtggtttgctcctgtactgagggatatcgacttgcagaaaaccagaagtcctgtgaaccagcagtgccatttccatgtggaagagtttctgtttcacaaacttctaagctcacccgtgctgaggctgtttttcctgatgtggactatgtaaattctactgaagctgaaaccattttggataacatcactcaaagcacccaatcatttaatgacttcactcgggttgttggtggagaagatgccaaaccaggtcaattcccttggcaggttgttttgaatggtaaagttgatgcattctgtggaggctctatcgttaatgaaaaatggattgtaactgctgcccactgtgttgaaactggtgttaaaattacagttgtcgcaggtgaacataatattgaggagacagaacatacagagcaaaagcgaaatgtgattcgaattattcctcaccacaactacaatgcagctattaataagtacaaccatgacattgcccttctggaactggacgaacccttagtgctaaacagctacgttacacctatttgcattgctgacaaggaatacacgaacatcttcctcaaatttggatctggctatgtaagtggctggggaagagtcttccacaaagggagatcagctttagttcttcagtaccttagagttccacttgttgaccgagccacatgtcttctgtctacaaagttcaccatctataacaacatgttctgtgctggcttccatgaaggaggtagagattcatgtcaaggagatagtgggggaccccatgttactgaagtggaagggaccagtttcttaactggaattattagctggggtgaagagtgtgcaatgaaaggcaaatatggaatatataccaaggtatcccggtatgtcaactggattaaggaaaaaacaaagctcact

SEQ ID NO: 477 - protein, 432 aa, Artificial Sequence
  human wild type FIX propeptide-mature
VFLDHENANKILNRPKRYNSGKLEEFVQGNLERECMEEKCSFEEAREVFENTERTTEFWKQYVDGDQCESNPCLNGGSCKDDINSYECWCPFGFEGKNCELDVTCNIKNGRCEQFCKNSADNKVVCSCTEGYRLAENQKSCEPAVPFPCGRVSVSQTSKLTRAETVFPDVDYVNSTEAETILDNITQSTQSFNDFTRVVGGEDAKPGQFPWQVVLNGKVDAFCGGSIVNEKWIVTAAHCVETGVKITVVAGEHNIEETEHTEQKRNVIRIIPHHNYNAAINKYNHDIALLELDEPLVLNSYVTPICIADKEYTNIFLKFGSGYVSGWGRVFHKGRSALVLQYLRVPLVDRATCLRSTKFTIYNNMFCAGFHEGGRDSCQGDSGGPHVTEVEGTSFLTGIISWGEECAMKGKYGIYTKVSRYVNWIKEKTKLT

SEQ ID NO: 478 - protein, 432 aa, Artificial Sequence
  human FIX R318Y/R338E/T343R propeptide-mature
VFLDHENANKILNRPKRYNSGKLEEFVQGNLERECMEEKCSFEEAREVFENTERTTEFWKQYVDGDQCESNPCLNGGSCKDDINSYECWCPFGFEGKNCELDVTCNIKNGRCEQFCKNSADNKVVCSCTEGYRLAENQKSCEPAVPFPCGRVSVSQTSKLTRAETVFPDVDYVNSTEAETILDNITQSTQSFNDFTRVVGGEDAKPGQFPWQVVLNGKVDAFCGGSIVNEKWIVTAAHCVETGVKITVVAGEHNIEETEHTEQKRNVIRIIPHHNYNAAINKYNHDIALLELDEPLVLNSYVTPICIADKEYTNIFLKFGSGYVSGWGRVFHKGYSALVLQYLRVPLVDRATCLESTKFRIYNNMFCAGFHEGGRDSCQGDSGGPHVTEVEGTSFLTGIISWGEECAMKGKYGIYTKVSRYVNWIKEKTKLT

SEQ ID NO: 479 - protein, 432 aa, Artificial Sequence
  human FIX R338L propeptide-mature
VFLDHENANKILNRPKRYNSGKLEEFVQGNLERECMEEKCSFEEAREVFENTERTTEFWKQYVDGDQCESNPCLNGGSCKDDINSYECWCPFGFEGKNCELDVTCNIKNGRCEQFCKNSADNKVVCSCTEGYRLAENQKSCEPAVPFPCGRVSVSQTSKLTRAETVFPDVDYVNSTEAETILDNITQSTQSFNDFTRVVGGEDAKPGQFPWQVVLNGKVDAFCGGSIVNEKWIVTAAHCVETGVKITVVAGEHNIEETEHTEQKRNVIRIIPHHNYNAAINKYNHDIALLELDEPLVLNSYVTPICIADKEYTNIFLKFGSGYVSGWGRVFHKGRSALVLQYLRVPLVDRATCLLSTKFTIYNNMFCAGFHEGGRDSCQGDSGGPHVTEVEGTSFLTGIISWGEECAMKGKYGIYTKVSRYVNWIKEKTKLT

SEQ ID NO: 480 - protein, 432 aa, Artificial Sequence
  human FIX T148A/R318Y/R338E/T343R propeptide-mature
VFLDHENANKILNRPKRYNSGKLEEFVQGNLERECMEEKCSFEEAREVFENTERTTEFWKQYVDGDQCESNPCLNGGSCKDDINSYECWCPFGFEGKNCELDVTCNIKNGRCEQFCKNSADNKVVCSCTEGYRLAENQKSCEPAVPFPCGRVSVSQTSKLTRAEAVFPDVDYVNSTEAETILDNITQSTQSFNDFTRVVGGEDAKPGQFPWQVVLNGKVDAFCGGSIVNEKWIVTAAHCVETGVKITVVAGEHNIEETEHTEQKRNVIRIIPHHNYNAAINKYNHDIALLELDEPLVLNSYVTPICIADKEYTNIFLKFGSGYVSGWGRVFHKGYSALVLQYLRVPLVDRATCLESTKFRIYNNMFCAGFHEGGRDSCQGDSGGPHVTEVEGTSFLTGIISWGEECAMKGKYGIYTKVSRYVNWIKEKTKLT

SEQ ID NO: 481 - protein, 432 aa, Artificial Sequence
  human FIX T148A/R338L propeptide-mature
VFLDHENANKILNRPKRYNSGKLEEFVQGNLERECMEEKCSFEEAREVFENTERTTEFWKQYVDGDQCESNPCLNGGSCKDDINSYECWCPFGFEGKNCELDVTCNIKNGRCEQFCKNSADNKVVCSCTEGYRLAENQKSCEPAVPFPCGRVSVSQTSKLTRAEAVFPDVDYVNSTEAETILDNITQSTQSFNDFTRVVGGEDAKPGQFPWQVVLNGKVDAFCGGSIVNEKWIVTAAHCVETGVKITVVAGEHNIEETEHTEQKRNVIRIIPHHNYNAAINKYNHDIALLELDEPLVLNSYVTPICIADKEYTNIFLKFGSGYVSGWGRVFHKGRSALVLQYLRVPLVDRATCLLSTKFTIYNNMFCAGFHEGGRDSCQGDSGGPHVTEVEGTSFLTGIISWGEECAMKGKYGIYTKVSRYVNWIKEKTKLT

SEQ ID NO: 482 - DNA, 1245 bp, Artificial Sequence
  human WT FIX mature
tataattcaggtaaattggaagagtttgttcaagggaaccttgagagagaatgtatggaagaaaagtgtagttttgaagaagcacgagaagtttttgaaaacactgaaagaacaactgaattttggaagcagtatgttgatggagatcagtgtgagtccaatccatgtttaaatggcggcagttgcaaggatgacattaattcctatgaatgttggtgtccctttggatttgaaggaaagaactgtgaattagatgtaacatgtaacattaagaatggcagatgcgagcagttttgtaaaaatagtgctgataacaaggtggtttgctcctgtactgagggatatcgacttgcagaaaaccagaagtcctgtgaaccagcagtgccatttccatgtggaagagtttctgtttcacaaacttctaagctcacccgtgctgagactgtttttcctgatgtggactatgtaaattctactgaagctgaaaccattttggataacatcactcaaagcacccaatcatttaatgacttcactcgggttgttggtggagaagatgccaaaccaggtcaattcccttggcaggttgttttgaatggtaaagttgatgcattctgtggaggctctatcgttaatgaaaaatggattgtaactgctgcccactgtgttgaaactggtgttaaaattacagttgtcgcaggtgaacataatattgaggagacagaacatacagagcaaaagcgaaatgtgattcgaattattcctcaccacaactacaatgcagctattaataagtacaaccatgacattgcccttctggaactggacgaacccttagtgctaaacagctacgttacacctatttgcattgctgacaaggaatacacgaacatcttcctcaaatttggatctggctatgtaagtggctggggaagagtcttccacaaagggagatcagctttagttcttcagtaccttagagttccacttgttgaccgagccacatgtcttcgatctacaaagttcaccatctataacaacatgttctgtgctggcttccatgaaggaggtagagattcatgtcaaggagatagtgggggaccccatgttactgaagtggaagggaccagtttcttaactggaattattagctggggtgaagagtgtgcaatgaaaggcaaatatggaatatataccaaggtatcccggtatgtcaactggattaaggaaaaaacaaagctcact

SEQ ID NO: 483 - DNA, 1245 bp, Artificial Sequence
  human FIX R318Y/R338E/T343R mature
tataattcaggtaaattggaagagtttgttcaagggaaccttgagagagaatgtatggaagaaaagtgtagttttgaagaagcacgagaagtttttgaaaacactgaaagaacaactgaattttggaagcagtatgttgatggagatcagtgtgagtccaatccatgtttaaatggcggcagttgcaaggatgacattaattcctatgaatgttggtgtccctttggatttgaaggaaagaactgtgaattagatgtaacatgtaacattaagaatggcagatgcgagcagttttgtaaaaatagtgctgataacaaggtggtttgctcctgtactgagggatatcgacttgcagaaaaccagaagtcctgtgaaccagcagtgccatttccatgtggaagagtttctgtttcacaaacttctaagctcacccgtgctgagactgtttttcctgatgtggactatgtaaattctactgaagctgaaaccattttggataacatcactcaaagcacccaatcatttaatgacttcactcgggttgttggtggagaagatgccaaaccaggtcaattcccttggcaggttgttttgaatggtaaagttgatgcattctgtggaggctctatcgttaatgaaaaatggattgtaactgctgcccactgtgttgaaactggtgttaaaattacagttgtcgcaggtgaacataatattgaggagacagaacatacagagcaaaagcgaaatgtgattcgaattattcctcaccacaactacaatgcagctattaataagtacaaccatgacattgcccttctggaactggacgaacccttagtgctaaacagctacgttacacctatttgcattgctgacaaggaatacacgaacatcttcctcaaatttggatctggctatgtaagtggctggggaagagtcttccacaaagggtactcagctttagttcttcagtaccttagagttccacttgttgaccgagccacatgtcttgaatctacaaagttcaggatctataacaacatgttctgtgctggcttccatgaaggaggtagagattcatgtcaaggagatagtgggggaccccatgttactgaagtggaagggaccagtttcttaactggaattattagctggggtgaagagtgtgcaatgaaaggcaaatatggaatatataccaaggtatcccggtatgtcaactggattaaggaaaaaacaaagctcact

SEQ ID NO: 484 - DNA, 1245 bp, Artificial Sequence
  human FIX R338L mature
tataattcaggtaaattggaagagtttgttcaagggaaccttgagagagaatgtatggaagaaaagtgtagttttgaagaagcacgagaagtttttgaaaacactgaaagaacaactgaattttggaagcagtatgttgatggagatcagtgtgagtccaatccatgtttaaatggcggcagttgcaaggatgacattaattcctatgaatgttggtgtccctttggatttgaaggaaagaactgtgaattagatgtaacatgtaacattaagaatggcagatgcgagcagttttgtaaaaatagtgctgataacaaggtggtttgctcctgtactgagggatatcgacttgcagaaaaccagaagtcctgtgaaccagcagtgccatttccatgtggaagagtttctgtttcacaaacttctaagctcacccgtgctgagactgtttttcctgatgtggactatgtaaattctactgaagctgaaaccattttggataacatcactcaaagcacccaatcatttaatgacttcactcgggttgttggtggagaagatgccaaaccaggtcaattcccttggcaggttgttttgaatggtaaagttgatgcattctgtggaggctctatcgttaatgaaaaatggattgtaactgctgcccactgtgttgaaactggtgttaaaattacagttgtcgcaggtgaacataatattgaggagacagaacatacagagcaaaagcgaaatgtgattcgaattattcctcaccacaactacaatgcagctattaataagtacaaccatgacattgcccttctggaactggacgaacccttagtgctaaacagctacgttacacctatttgcattgctgacaaggaatacacgaacatcttcctcaaatttggatctggctatgtaagtggctggggaagagtcttccacaaagggagatcagctttagttcttcagtaccttagagttccacttgttgaccgagccacatgtcttctgtctacaaagttcaccatctataacaacatgttctgtgctggcttccatgaaggaggtagagattcatgtcaaggagatagtgggggaccccatgttactgaagtggaagggaccagtttcttaactggaattattagctggggtgaagagtgtgcaatgaaaggcaaatatggaatatataccaaggtatcccggtatgtcaactggattaaggaaaaaacaaagctcact

SEQ ID NO: 485 - DNA, 1245 bp, Artificial Sequence
  human FIX T148A mature
tataattcaggtaaattggaagagtttgttcaagggaaccttgagagagaatgtatggaagaaaagtgtagttttgaagaagcacgagaagtttttgaaaacactgaaagaacaactgaattttggaagcagtatgttgatggagatcagtgtgagtccaatccatgtttaaatggcggcagttgcaaggatgacattaattcctatgaatgttggtgtccctttggatttgaaggaaagaactgtgaattagatgtaacatgtaacattaagaatggcagatgcgagcagttttgtaaaaatagtgctgataacaaggtggtttgctcctgtactgagggatatcgacttgcagaaaaccagaagtcctgtgaaccagcagtgccatttccatgtggaagagtttctgtttcacaaacttctaagctcacccgtgctgaggctgtttttcctgatgtggactatgtaaattctactgaagctgaaaccattttggataacatcactcaaagcacccaatcatttaatgacttcactcgggttgttggtggagaagatgccaaaccaggtcaattcccttggcaggttgttttgaatggtaaagttgatgcattctgtggaggctctatcgttaatgaaaaatggattgtaactgctgcccactgtgttgaaactggtgttaaaattacagttgtcgcaggtgaacataatattgaggagacagaacatacagagcaaaagcgaaatgtgattcgaattattcctcaccacaactacaatgcagctattaataagtacaaccatgacattgcccttctggaactggacgaacccttagtgctaaacagctacgttacacctatttgcattgctgacaaggaatacacgaacatcttcctcaaatttggatctggctatgtaagtggctggggaagagtcttccacaaagggagatcagctttagttcttcagtaccttagagttccacttgttgaccgagccacatgtcttcgatctacaaagttcaccatctataacaacatgttctgtgctggcttccatgaaggaggtagagattcatgtcaaggagatagtgggggaccccatgttactgaagtggaagggaccagtttcttaactggaattattagctggggtgaagagtgtgcaatgaaaggcaaatatggaatatataccaaggtatcccggtatgtcaactggattaaggaaaaaacaaagctcact

SEQ ID NO: 486 - DNA, 1245 bp, Artificial Sequence
  human FIX T148A/R318Y/R338E/T343R mature
tataattcaggtaaattggaagagtttgttcaagggaaccttgagagagaatgtatggaagaaaagtgtagttttgaagaagcacgagaagtttttgaaaacactgaaagaacaactgaattttggaagcagtatgttgatggagatcagtgtgagtccaatccatgtttaaatggcggcagttgcaaggatgacattaattcctatgaatgttggtgtccctttggatttgaaggaaagaactgtgaattagatgtaacatgtaacattaagaatggcagatgcgagcagttttgtaaaaatagtgctgataacaaggtggtttgctcctgtactgagggatatcgacttgcagaaaaccagaagtcctgtgaaccagcagtgccatttccatgtggaagagtttctgtttcacaaacttctaagctcacccgtgctgaggctgtttttcctgatgtggactatgtaaattctactgaagctgaaaccattttggataacatcactcaaagcacccaatcatttaatgacttcactcgggttgttggtggagaagatgccaaaccaggtcaattcccttggcaggttgttttgaatggtaaagttgatgcattctgtggaggctctatcgttaatgaaaaatggattgtaactgctgcccactgtgttgaaactggtgttaaaattacagttgtcgcaggtgaacataatattgaggagacagaacatacagagcaaaagcgaaatgtgattcgaattattcctcaccacaactacaatgcagctattaataagtacaaccatgacattgcccttctggaactggacgaacccttagtgctaaacagctacgttacacctatttgcattgctgacaaggaatacacgaacatcttcctcaaatttggatctggctatgtaagtggctggggaagagtcttccacaaagggtactcagctttagttcttcagtaccttagagttccacttgttgaccgagccacatgtcttgaatctacaaagttcaggatctataacaacatgttctgtgctggcttccatgaaggaggtagagattcatgtcaaggagatagtgggggaccccatgttactgaagtggaagggaccagtttcttaactggaattattagctggggtgaagagtgtgcaatgaaaggcaaatatggaatatataccaaggtatcccggtatgtcaactggattaaggaaaaaacaaagctcact

SEQ ID NO: 487 - DNA, 1245 bp, Artificial Sequence
  human FIX T148A/R338L mature
tataattcaggtaaattggaagagtttgttcaagggaaccttgagagagaatgtatggaagaaaagtgtagttttgaagaagcacgagaagtttttgaaaacactgaaagaacaactgaattttggaagcagtatgttgatggagatcagtgtgagtccaatccatgtttaaatggcggcagttgcaaggatgacattaattcctatgaatgttggtgtccctttggatttgaaggaaagaactgtgaattagatgtaacatgtaacattaagaatggcagatgcgagcagttttgtaaaaatagtgctgataacaaggtggtttgctcctgtactgagggatatcgacttgcagaaaaccagaagtcctgtgaaccagcagtgccatttccatgtggaagagtttctgtttcacaaacttctaagctcacccgtgctgaggctgtttttcctgatgtggactatgtaaattctactgaagctgaaaccattttggataacatcactcaaagcacccaatcatttaatgacttcactcgggttgttggtggagaagatgccaaaccaggtcaattcccttggcaggttgttttgaatggtaaagttgatgcattctgtggaggctctatcgttaatgaaaaatggattgtaactgctgcccactgtgttgaaactggtgttaaaattacagttgtcgcaggtgaacataatattgaggagacagaacatacagagcaaaagcgaaatgtgattcgaattattcctcaccacaactacaatgcagctattaataagtacaaccatgacattgcccttctggaactggacgaacccttagtgctaaacagctacgttacacctatttgcattgctgacaaggaatacacgaacatcttcctcaaatttggatctggctatgtaagtggctggggaagagtcttccacaaagggagatcagctttagttcttcagtaccttagagttccacttgttgaccgagccacatgtcttctgtctacaaagttcaccatctataacaacatgttctgtgctggcttccatgaaggaggtagagattcatgtcaaggagatagtgggggaccccatgttactgaagtggaagggaccagtttcttaactggaattattagctggggtgaagagtgtgcaatgaaaggcaaatatggaatatataccaaggtatcccggtatgtcaactggattaaggaaaaaacaaagctcact

SEQ ID NO: 488 - protein, 415 aa, Artificial Sequence
  human FIX R338L mature
YNSGKLEEFVQGNLERECMEEKCSFEEAREVFENTERTTEFWKQYVDGDQCESNPCLNGGSCKDDINSYECWCPFGFEGKNCELDVTCNIKNGRCEQFCKNSADNKVVCSCTEGYRLAENQKSCEPAVPFPCGRVSVSQTSKLTRAETVFPDVDYVNSTEAETILDNITQSTQSFNDFTRVVGGEDAKPGQFPWQVVLNGKVDAFCGGSIVNEKWIVTAAHCVETGVKITVVAGEHNIEETEHTEQKRNVIRIIPHHNYNAAINKYNHDIALLELDEPLVLNSYVTPICIADKEYTNIFLKFGSGYVSGWGRVFHKGRSALVLQYLRVPLVDRATCLLSTKFTIYNNMFCAGFHEGGRDSCQGDSGGPHVTEVEGTSFLTGIISWGEECAMKGKYGIYTKVSRYVNWIKEKTKLT

SEQ ID NO: 489 - protein, 415 aa, Artificial Sequence; identical to SEQ ID NO: 20
  human FIX T148A mature

SEQ ID NO: 490 - protein, 415 aa, Artificial Sequence
  human FIX T148A/R318Y/R338E/T343R mature
YNSGKLEEFVQGNLERECMEEKCSFEEAREVFENTERTTEFWKQYVDGDQCESNPCLNGGSCKDDINSYECWCPFGFEGKNCELDVTCNIKNGRCEQFCKNSADNKVVCSCTEGYRLAENQKSCEPAVPFPCGRVSVSQTSKLTRAEAVFPDVDYVNSTEAETILDNITQSTQSFNDFTRVVGGEDAKPGQFPWQVVLNGKVDAFCGGSIVNEKWIVTAAHCVETGVKITVVAGEHNIEETEHTEQKRNVIRIIPHHNYNAAINKYNHDIALLELDEPLVLNSYVTPICIADKEYTNIFLKFGSGYVSGWGRVFHKGYSALVLQYLRVPLVDRATCLESTKFRIYNNMFCAGFHEGGRDSCQGDSGGPHVTEVEGTSFLTGIISWGEECAMKGKYGIYTKVSRYVNWIKEKTKLT

SEQ ID NO: 491 - protein, 415 aa, Artificial Sequence
  human FIX T148A/R338L mature
YNSGKLEEFVQGNLERECMEEKCSFEEAREVFENTERTTEFWKQYVDGDQCESNPCLNGGSCKDDINSYECWCPFGFEGKNCELDVTCNIKNGRCEQFCKNSADNKVVCSCTEGYRLAENQKSCEPAVPFPCGRVSVSQTSKLTRAEAVFPDVDYVNSTEAETILDNITQSTQSFNDFTRVVGGEDAKPGQFPWQVVLNGKVDAFCGGSIVNEKWIVTAAHCVETGVKITVVAGEHNIEETEHTEQKRNVIRIIPHHNYNAAINKYNHDIALLELDEPLVLNSYVTPICIADKEYTNIFLKFGSGYVSGWGRVFHKGRSALVLQYLRVPLVDRATCLLSTKFTIYNNMFCAGFHEGGRDSCQGDSGGPHVTEVEGTSFLTGIISWGEECAMKGKYGIYTKVSRYVNWIKEKTKLT

SEQ ID NO: 492 - protein, 737 aa, Artificial Sequence
  10A4 capsid
MAADGYLPDWLEDNLSEGIREWWDLKPGAPKPKANQQKQDDGRGLVLPGYKYLGPFNGLDKGEPVNAADAAALEHDKAYDQQLKAGDNPYLRYNHADAEFQERLQEDTSFGGNLGRAVFQAKKRLLEPLGLVEEAAKTAPGKKRPVEQSPQEPDSSSGIGKTGQQPAKKRLNFGQTGDTESVPDPQPLGEPPAAPTSLGSNTMASGGGAPMADNNEGADGVGNASGNWHCDSTWLGDRVITTSTRTWALPTYNNHLYKQISSASTGASNDNHYFGYSTPWGYFDFNRFHCHFSPRDWQRLINNNWGFRPKKLSFKLFNIQVKEVTQNDGTTTIANNLTSTIQVFTDSEYQLPYVLGSAHQGCLPPFPADVFMIPQYGYLTLNNGSQAVGRSSFYCLEYFPSQMLRTGNNFTFSYTFEEVPFHSSYAHSQSLDRLMNPLIDQYLYYLNRTQGTTSGTTNQSRLLFSQAGPQSMSLQARNWLPGPCYRQQRLSKTANDNNNSNFPWTAASKYHLNGRDSLVNPGPAMASHKDDEEKFFPMHGNLIFGKEGTTASNAELDNVMITDEEEIRTTNPVATEQYGTVANNLQSSNTAPTTRTVNDQGALPGMVWQDRDVYLQGPIWAKIPHTDGHFHPSPLMGGFGLKHPPPQIMIKNTPVPANPPTTFSPAKFASFITQYSTGQVSVEIEWELQKENSKRWNPEIQYTSNYNKSVNVDFTVDTNGVYSEPRPIGTRYLTRPL

SEQ ID NO: 493 - protein, 737 aa, Artificial Sequence
  10A5 capsid
MAADGYLPDWLEDNLSEGIREWWDLKPGAPKPKANQQKQDDARGLVLPGYKYLGPGNGLDKGEPVNAADAAALEHDKAYDQQLQAGDNPYLRYNHADAEFQERLQEDTSFGGNLGRAVFQAKKRVLEPLGLVEEAAKTAPGKKRPVEQSPQEPDSSSGIGKTGQQPAKKRLNFGQTGDSESVPDPQPLGEPPAAPTSLGSNTMASGGGAPMADNNEGADGVGNSSGNWHCDSQWLGDRVITTSTRTWALPTYNNHLYKQISSASTGASNDNHYFGYSTPWGYFDFNRFHCHFSPRDWQRLINNNWGFRPKRLNFKLFNIQVKEVTTNDGVTTIANNLTSTVQVFTDSEYQLPYVLGSAHQGCLPPFPADVFMVPQYGYLTLNNGSQAVGRSSFYCLEYFPSQMLRTGNNFQFSYTFEDVPFHSSYAHSQSLDRLMNPLIDQYLYYLNRTQGTTSGTTNQSRLLFSQAGPQSMSLQARNWLPGPCYRQQRLSKTANDNNNSNFPWTAASKYHLNGRDSLVNPGPAMASHKDDEEKFFPMHGNLIFGKEGTTASNAELDNVMITDEEEIRTTNPVATEQYGTVANNLQSSNTAPTTRTVNDQGALPGMVWQDRDVYLQGPIWAKIPHTDGHFHPSPLMGGFGLKHPPPQILIKNTPVPANPPAEFSATKFASFITQYSTGQVSVEIEWELQKENSKRWNPEIQYTSNYNKSVNVDFTVDTNGVYSEPRPIGTRYLTRPL

SEQ ID NO: 494 - protein, 737 aa, Artificial Sequence
  10B1 capsid
MAADGYLPDWLEDNLSEGIRQWWKLKPGPPPPKPAERHKDDSRGLVLPGYKYLGPFNGLDKGEPVNAADAAALEHDKAYDQQLKAGDNPYLRYNHADAEFQERLKEDTSFGGNLGRAVFQAKKRVLEPLGLVEEGAKTAPGKKRPVEHSPVEPDSSSGIGKTGQQPAKKRLNFGQTGDSESVPDPQPLGEPPAAPSGLGTNTMASGGGAPMADNNEGADGVGNSSGNWHCDSTWLGDRVITTSTRTWALPTYNNHLYKQISSASTGASNDNHYFGYSTPWGYFDFNRFHCHFSPRDWQRLINNNWGFRPKRLNFKLFNIQVKEVTTNDGVTTIANNLTSTVQVFTDSEYQLPYVLGSAHQGCLPPFPADVFMVPQYGYLTLNNGSQAVGRSSFYCLEYFPSQMLRTGNNFQFTYTFEDVPFHSSYAHSQSLDRLMNPLIDQYLYYLNRTQGTTSGTTNQSRLLFSQAGPQSMSLQARNWLPGPCYRQQRLSKTANDNNNSNFPWTAASKYHLNGRDSLVNPGPAMASHKDDEEKFFPMHGNLIFGKEGTTASNAELDNVMITDEEEIRTTNPVATEQYGTVANNLQSSNTAPTTRTVNDQGALPGMVWQDRDVYLQGPIWAKIPHTDGHFHPSPLMGGFGLKHPPPQIMIKNTPVPANPPTTFSPAKFASFITQYSTGQVSVEIEWELQKENSKRWNPEIQYTSNYNKSVNVDFTVDTNGVYSEPRPIGTRYLTRPL

SEQ ID NO: 495 - protein, 737 aa, Artificial Sequence
  10B3 capsid
MAADGYLPDWLEDTLSEGIRQWWKLKPGPPPPKPAERHKDDSRGLVLPGYKYLGPFNGLDKGEPVNAADAAALEHDKAYDQQLKAGDNPYLRYNHADAEFQERLQEDTSFGGNLGRAVFQAKKRLLEPLGLVEEAAKTAPGKKRPVEHSPVEPDSSSGTGKAGQQPAKKRLNFGQTGDSESVPDPQPLGEPPAAPSGVGPNTMAAGGGAPMADNNEGADGVGNASGNWHCDSTWLGDRVITTSTRTWALPTYNNHLYKQISSASTGASNDNHYFGYSTPWGYFDFNRFHCHFSPRDWQRLINNNWGFRPKRLSFKLFNIQVKEVTTNDGVTTIANNLTSTVQVFTDSEYQLPYVLGSAHQGCLPPFPADVFMVPQYGYLTLNNGSQAVGRSSFYCLEYFPSQMLRTGNNFQFSYTFEDVPFHSSYAHSQSLDRLMNPLIDQYLYYLNRTQGTTSGTTNQSRLLFSQAGPQSMSLQARNWLPGPCYRQQRLSKTANDNNNSNFPWTAASKYHLNGRDSLVNPGPAMASHKDDEEKFFPMHGNLIFGKEGTTASNAELDNVMITDEEEIRTTNPVATEQYGTVANNLQSSNTAPTTRTVNDQGALPGMVWQDRDVYLQGPIWAKIPHTDGHFHPSPLMGGFGLKHPPPQIMIKNTPVPANPPTTFSPAKFASFITQYSTGQVSVEIEWELQKENSKRWNPEIQYTSNYNKSVNVDFTVDTNGVYSEPRPIGTRYLTRPL

SEQ ID NO: 496 - protein, 737 aa, Artificial Sequence
  10B5 capsid
MAADGYLPDWLEDNLSEGIREWWALQPGAPKPKANQQKQDDGRGLVLPGYKYLGPFNGLDKGEPVNAADAAALEHDKAYDQQLKAGDNPYLRYNHADAEFQERLQEDTSFGGNLGRAVFQAKKRVLEPLGLVEEGAKTAPGKKRPVEQSPQEPDSSSGIGKTGQQPAKKRLNFGQTGDSESVPDPQPIGEPPAGPSGLGTGTMASGSGAPMADNNEGADGVGNSSGNWHCDSQWLGDRVITTSTRTWALPTYNNHLYKQISSASTGASNDNHYFGYSTPWGYFDFNRFHCHFSPRDWQRLINNNWGFRPKRLNFKLFNIQVKEVTTNDGVTTIANNLTSTIQVFTDSEYQLPYVLGSAHQGCLPPFPADVFMIPQYGYLTLNNGSQAVGRSSFYCLEYFPSQMLRTGNNFTFSYTFEDVPFHSSYAHSQSLDRLMNPLIDQYLYYLNRTQGTTSGTTNQSRLLFSQAGPQSMSLQARNWLPGPCYRQQRLSKTANDNNNSNFPWTAASKYHLNGRDSLVNPGPAMASHKDDEEKFFPMHGNLIFGKEGTTASNAELDNVMITDEEEIRTTNPVATEQYGTVANNLQSSNTAPTTRTVNDQGALPGMVWQDRDVYLQGPIWAKIPHTDGHFHPSPLMGGFGLKHPPPQIMIKNTPVPANPPTTFSPAKFASFITQYSTGQVSVEIEWELQKENSKRWNPEIQYTSNYNKSVNVDFTVDTNGVYSEPRPIGTRYLTRPL

SEQ ID NO: 497 - protein, 737 aa, Artificial Sequence
  10B6 capsid
MAADGYLPDWLEDTLSEGIRQWWKLKPGPPPPKPAERHKDDSRGLVLPGYKYLGPFNGLDKGEPVNAADAAALEHDKAYDQQLKAGDNPYLRYNHADAEFQERLKEDTSFGGNLGRAVFQAKKRVLEPFGLVEEAAKTAPGKKRPVDQSPQEPDSSSGVGKSGKQPARKRLNFGQTGDSESVPDPQPLGEPPAAPTSLGSNTMASGGGAPMADNNEGADGVGNASGNWHCDSTWLGDRVITTSTRTWALPTYNNHLYKQISSASTGASNDNHYFGYSTPWGYFDFNRFHCHFSPRDWQRLINNNWGFRPKKLSFKLFNIQVKEVTQNEGTKTIANNLTSTIQVFTDSEYQLPYVLGSAHQGCLPPFPADVFMIPQYGYLTLNNGSQAVGRSSFYCLEYFPSQMLRTGNNFQFTYTFEDVPFHSSYAHSQSLDRLMNPLIDQYLYYLNRTQGTTSGTTNQSRLLFSQAGPQSMSLQARNWLPGPCYRQQRLSKTANDNNNSNFPWTAASKYHLNGRDSLVNPGPAMASHKDDEEKFFPMHGNLIFGKEGTTASNAELDNVMITDEEEIRTTNPVATEQYGTVANNLQSSNTAPTTRTVNDQGALPGMVWQDRDVYLQGPIWAKIPHTDGHFHPSPLMGGFGMKHPPPQILIKNTPVPADPPTAFNKDKLNSFITQYSTGQVSVEIEWELQKENSKRWNPEIQYTSNYYKSTSVDFAVNTEGVYSEPRPIGTRYLTRNL

SEQ ID NO: 498 - protein, 736 aa, Artificial Sequence
  10B7 capsid
MAADGYLPDWLEDTLSEGIRQWWKLKPGPPPPKPAERHKDDSRGLVLPGYKYLGPFNGLDKGEPVNEADAAALEHDKAYDQQLKAGDNPYLKYNHADAEFQERLKEDTSFGGNLGRAVFQAKKRVLEPLGLVEEAAKTAPGKKRPVEHSPVEPDSSSGTGKAGQQPARKRLNFGQTGDADSVPDPQPLGEPPAAPTSLGSNTMASGGGAPMADNNEGADGVGSSSGNWHCDSTWLGDRVITTSTRTWALPTYNNHLYKQISSASTGASNDNHYFGYSTPWGYFDFNRFHCHFSPRDWQRLINNNWGFRPKRLNFKLFNIQVKEVTQNEGTKTIANNLTSTIQVFTDSEYQLPYVLGSAHQGCLPPFPADVFMIPQYGYLTLNNGSQAMGRSSFYCLEYFPSQMLRTGNNFTFSYTFEDVPFHSSYAHSQSLDRLMNPLIDQYLYYLSRTQSTGGTAGTQQLLFSQAGPNNMSAQARNWLPGPCYRQQRLSKTANDNNNSNFPWTAASKYHLNGRDSLVNPGPAMASHKDDEEKFFPMHGNLIFGKEGTTASNAELDNVMITDEEEIRTTNPVATEQYGTVANNLQSSNTAPTTRTVNDQGALPGMVWQDRDVYLQGPIWAKIPHTDGHFHPSPLMGGFGLKHPPPQILIKNTPVPADPPTTFNQSKLNSFITQYSTGQVSVEIEWELQKENSKRWNPEIQYTSNYNKSVNVDFTVDTNGVYSEPRPIGTRYLTRNL

SEQ ID NO: 499 - protein, 737 aa, Artificial Sequence
  18B2 capsid
MAADGYLPDWLEDTLSEGIRQWWKLKPGPPPPKPAERHKDDSRGLVLPGYKYLGPFNGLDKGEPVNAADAAALEHDKAYDQQLKAGDNPYLRYNHADAEFQERLQEDTSFGGNLGRAVFQAKKRVLEPFGLVEEGAKTAPGKKRPVEHSPVEPDSSSGTGKAGQQPARKRLNFGQTGDSESVPDPQPLGEPPAAPSGVGPNTMASGGGAPMADNNEGADGVGNASGNWHCDSTWLGDRVITTSTRTWALPTYNNHLYKQISSASTGASNDNHYFGYSTPWGYFDFNRFHCHFSPRDWQRLINNNWGFRPKRLNFKLFNIQVKEVTQNDGTTTIANNLTSTVQVFTDSEYQLPYVLGSAHQGCLPPFPADVFMVPQYGYLTLNNGSQAVGRSSFYCLEYFPSQMLRTGNNFQFSYTFEDVPFHSSYAHSQSLDRLMNPLIDQYLYYLNRTQGTTSGTTNQSRLLFSQAGPQSMSLQARNWLPGPCYRQQRLSKTANDNNNSNFPWTAASKYHLNGRDSLVNPGPAMASHKDDEEKFFPMHGNLIFGKEGTTASNAELDNVMITDEEEIRTTNPVATEQYGTVANNLQSSNTAPTTRTVNDQGALPGMVWQDRDVYLQGPIWAKIPHTDGHFHPSPLMGGFGLKHPPPQIMIKNTPVPANPPTTFSPAKFASFITQYSTGQVSVEIEWELQKENSKRWNPEIQYTSNYYKSTSVDFAVNTEGVYSEPRPIGTRYLTRNL

SEQ ID NO: 500 - protein, 737 aa, Artificial Sequence
  18B3 capsid
MAADGYLPDWLEDNLSEGIREWWDLKPGAPKPKANQQKQDDGRGLVLPGYKYLGPFNGLDKGEPVNAADAAALEHDKAYDQQLQAGDNPYLRYNHADAEFQERLQEDTSFGGNLGRAVFQAKKRLLEPLGLVEEAAKTAPGKKRPVEHSPVEPDSSSGTGKAGQQPARKRLNFGQTGDADSVPDPQPIGEPPAAPSGVGSLTMAAGGGAPMADNNEGADGVGNSSGNWHCDSTWMGDRVITTSTRTWALPTYNNHLYKQISSASTGASNDNHYFGYSTPWGYFDFNRFHCHFSPRDWQRLINNNWGFRPKRLNFKLFNIQVKEVTTNDGVTTIANNLTSTVQVFSDSEYQLPYVLGSAHQGCLPPFPADVFMIPQYGYLTLNNGSQAVGRSSFYCLEYFPSQMLRTGNNFTFSYTFEDVPFHSSYAHSQSLDRLMNPLIDQYLYYLNRTQGTTSGTTNQSRLLFSQAGPQSMSLQARNWLPGPCYRQQRLSKTANDNNNSNFPWTAASKYHLNGRDSLVNPGPAMASHKDDEEKFFPMHGNLIFGKEGTTASNAELDNVMITDEEEIRTTNPVATEQYGTVANNLQSSNTAPTTRTVNDQGALPGMVWQDRDVYLQGPIWAKIPHTDGHFHPSPLMGGFGLKHPPPQIMIKNTPVPANPPTTFSPAKFASFITQYSTGQVSVEIEWELQKENSKRWNPEIQYTSNYNKSVNVDFTVDTNGVYSEPRPIGTRYLTRPL

SEQ ID NO: 501 - DNA, 145 bp, Artificial Sequence
  AAV2 ITR
aggaacccctagtgatggagttggccactccctctctgcgcgctcgctcgctcactgaggccgcccggggaaaccccgggcgtcgggcgacctttggtcgcccggcctcagtgagcgagcgagcgcgcagagagggagtggccaa

SEQ ID NO: 502 - DNA, 143 bp, Artificial Sequence
  AAV1 ITR
  GenBank: AF063497.1
ttacccctagtgatggagttgcccactccctctctgcgcgctcgctcgctcggtggggcctgcggaccaaaggtccgcagacggcagagctctgctctgccggccccaccgagcgagcgagcgcgcagagagggagtgggcaa

SEQ ID NO: 503 - DNA, 134 bp, Artificial Sequence
  AAV3 ITR
  Genbank U48704.1
gtgatggagttggccactccctctatgcgcactcgctcgctcggtggggcctggcgaccaaaggtcgccagacggacgtgctttgcacgtccggccccaccgagcgagcgagtgcgcatagagggagtggccaa

SEQ ID NO: 504 - DNA, 146 bp, Artificial Sequence
  AAV4 ITR
gggcaaacctagatgatggagttggccactccctctatgcgcgctcgctcactcactcggccctgccggccagaggccggcagtctggagacctttggtctccagggccgagtgagtgagcgagcgcgcatagagggagtggccaa

SEQ ID NO: 505 - DNA, 144 bp, Artificial Sequence
  AAV4 ITR
  GenBank: U89790.1
ggcaaaccagatgatggagttggccacattagctatgcgcgctcgctcactcactcggccctggagaccaaaggtctccagactgccggcctctggccggcagggccgagtgagtgagcgagcgcgcatagagggagtggccaa

SEQ ID NO: 506 - DNA, 165 bp, Artificial Sequence
  AAV5 ITR
tacaaaacctccttgcttgagagtgtggcactctccccctgtcgcgttcgcgcgctcgctggctcgtttggggggcgacggccagagggccgtcgtctggcagctctttgagctgccacccccccaaacgagccagcgagcgcgcgaacgcgacaggggggagag

SEQ ID NO: 507 - DNA, 167 bp, Artificial Sequence
  AAV5 ITR
  GenBank: AF085716.1
tacaaaacctccttgcttgagagtgtggcactctcccccctgtcgcgttcgctcgctcgctggctcgtttgggggggtggcagctcaaagagctgccagacgacggccctctggccgtcgcccccccaaacgagccagcgagcgagcgaacgcgacaggggggagag

SEQ ID NO: 508 - DNA, 143 bp, Artificial Sequence
  AAV6 ITR
atacccctagtgatggagttgcccactccctctatgcgcgctcgctcgctcggtggggccggcagaggagacctctgccgtctgcggacctttggtccgcaggccccaccgagcgagcgagcgcgcatagagggagtgggcaa

SEQ ID NO: 509 - DNA, 143 bp, Artificial Sequence
  AAV6 ITR
  GenBank: AF028704.1
atacccctagtgatggagttgcccactccctctatgcgcgctcgctcgctcggtggggccggcagagcagagctctgccgtctgcggacctttggtccgcaggccccaccgagcgagcgagcgcgcatagagggagtgggcaa

SEQ ID NO: 510 - DNA, 141 bp, Artificial Sequence
  R ITR
cctgcaggcagctgcgcgctcgctcgctcactgaggccgcccgggcaaagcccgggcgtcgggcgacctttggtcgcccggcctcagtgagcgagcgagcgcgcagagagggagtggccaactccatcactaggggttcct

SEQ ID NO: 511 - DNA, 141 bp, Artificial Sequence
  L ITR
aggaacccctagtgatggagttggccactccctctctgcgcgctcgctcgctcactgaggccgggcgaccaaaggtcgcccgacgcccgggctttgcccgggcggcctcagtgagcgagcgagcgcgcagctgcctgcagg

SEQ ID NO: 512 - DNA, 20 bp, Artificial Sequence
  BGH sequencing primer fwd
gccttctagttgccagccat

SEQ ID NO: 513 - DNA, 19 bp, Artificial Sequence
  BGH sequencing primer rev
ggcaccttccagggtcaag

SEQ ID NO: 514 - DNA, 22 bp, Artificial Sequence
  FIX forward PCR primer
atctacaacaacatgttctgcg

SEQ ID NO: 515 - DNA, 20 bp, Artificial Sequence
  FIX reverse PCR primer
ctgatgatgccggtcagaaa

SEQ ID NO: 516 - DNA, 20 bp, Artificial Sequence
  GAPDH forward PCR primer
tgtgtccgtcgtggatctga

SEQ ID NO: 517 - DNA, 22 bp, Artificial Sequence
  GAPDH reverse PCR primer
gcctgcttcaccaccttcttga

SEQ ID NO: 518 - DNA, 1245 bp, Artificial Sequence
  hWT-FIX mature codon optimized for human 0.5 optimization
tataattcaggcaaactggaagagtttgtgcaggggaacctggagagagaatgtatggaagaaaagtgtagttttgaagaagcacgagaagtgtttgaaaacactgaaagaacaactgaattttggaagcagtatgtggatggagatcagtgtgagtccaatccatgtctgaatggcggcagttgcaaggatgacattaattcctatgaatgttggtgtccctttggatttgaaggaaagaactgtgaactggatgtgacatgtaacattaagaatggcagatgcgagcagttttgtaaaaatagtgctgataacaaggtggtgtgctcctgtactgagggatatcgactggcagaaaaccagaagtcctgtgaaccagcagtgccatttccatgtggaagagtgtctgtgtcacagacttctaagctgacccgggctgagactgtgtttcctgatgtggactatgtgaattctactgaagctgaaaccattctggataacatcactcagagcacccagtcatttaatgacttcactcgggtggtgggcggagaagatgccaaaccaggccagttcccttggcaggtggtgctgaatggcaaagtggatgcattctgtggaggctctatcgtgaatgaaaaatggattgtgactgctgcccactgtgtggaaactggcgtgaaaattacagtggtcgcaggcgaacataatattgaggagacagaacatacagagcagaagcgaaatgtgattcgaattattcctcaccacaactacaatgcagctattaataagtacaaccatgacattgccctgctggaactggacgaacccctggtgctgaacagctacgtgacacctatttgcattgctgacaaggaatacaccaacatcttcctgaaatttggatctggctatgtgagtggctggggaagagtcttccacaaagggagatcagctctggtgctgcagtacctgagagtgccactggtggaccgagccacatgtctgcgatctacaaagttcaccatctataacaacatgttctgtgctggcttccatgaaggaggcagagattcatgtcagggagatagtgggggaccccatgtgactgaagtggaagggaccagtttcctgactggaattattagctggggcgaagagtgtgcaatgaaaggcaaatatggaatctataccaaggtgtcccggtatgtcaactggattaaggaaaaaacaaagctgact

SEQ ID NO: 519 - DNA, 1245 bp, Artificial Sequence
  hWT-FIX mature codon optimized for human 0.8 optimization
tacaatagcggcaagctggaggagtttgtgcagggcaacctggagagagagtgtatggaggagaagtgtagctttgaggaggcccgggaggtgtttgagaacaccgagagaaccaccgagttttggaagcagtacgtggatggcgatcagtgtgagtccaatccatgtctgaatggcggcagctgcaaggatgacatcaattcctacgagtgttggtgtccctttggctttgagggcaagaactgtgagctggatgtgacctgtaacatcaagaatggcagatgcgagcagttttgtaagaatagcgccgataacaaggtggtgtgctcctgtaccgagggctaccggctggccgagaaccagaagtcctgtgagccagccgtgccatttccatgtggcagagtgagcgtgagccagaccagcaagctgacccgggccgagaccgtgtttcctgatgtggactacgtgaatagcaccgaggccgagaccatcctggataacatcacccagagcacccagagctttaatgacttcacccgggtggtgggcggcgaggatgccaagccaggccagttcccttggcaggtggtgctgaatggcaaggtggatgccttctgtggcggcagcatcgtgaatgagaagtggatcgtgaccgccgcccactgtgtggagaccggcgtgaagatcaccgtggtggccggcgagcacaatatcgaggagaccgagcacaccgagcagaagcggaatgtgatccggatcatccctcaccacaactacaatgccgccatcaataagtacaaccacgacatcgccctgctggagctggacgagcccctggtgctgaacagctacgtgacccctatctgcatcgccgacaaggagtacaccaacatcttcctgaagtttggcagcggctacgtgagcggctggggcagagtgttccacaagggcagaagcgccctggtgctgcagtacctgagagtgccactggtggaccgggccacctgtctgcggagcaccaagttcaccatctacaacaacatgttctgtgccggcttccacgagggcggcagagatagctgtcagggcgatagcggcggcccccacgtgaccgaggtggagggcaccagcttcctgaccggcatcatcagctggggcgaggagtgtgccatgaagggcaagtacggcatctacaccaaggtgtcccggtacgtgaactggatcaaggagaagaccaagctgacc

SEQ ID NO: 520 - DNA, 1245 bp, Artificial Sequence
  hWT-FIX mature codon optimized for human 1.0 optimization
tacaacagcggcaagctggaggagttcgtgcagggcaacctggagcgggagtgcatggaggagaagtgcagcttcgaggaggcccgggaggtgttcgagaacaccgagcggaccaccgagttctggaagcagtacgtggacggcgaccagtgcgagagcaacccctgcctgaacggcggcagctgcaaggacgacatcaacagctacgagtgctggtgccccttcggcttcgagggcaagaactgcgagctggacgtgacctgcaacatcaagaacggccggtgcgagcagttctgcaagaacagcgccgacaacaaggtggtgtgcagctgcaccgagggctaccggctggccgagaaccagaagagctgcgagcccgccgtgcccttcccctgcggccgggtgagcgtgagccagaccagcaagctgacccgggccgagaccgtgttccccgacgtggactacgtgaacagcaccgaggccgagaccatcctggacaacatcacccagagcacccagagcttcaacgacttcacccgggtggtgggcggcgaggacgccaagcccggccagttcccctggcaggtggtgctgaacggcaaggtggacgccttctgcggcggcagcatcgtgaacgagaagtggatcgtgaccgccgcccactgcgtggagaccggcgtgaagatcaccgtggtggccggcgagcacaacatcgaggagaccgagcacaccgagcagaagcggaacgtgatccggatcatcccccaccacaactacaacgccgccatcaacaagtacaaccacgacatcgccctgctggagctggacgagcccctggtgctgaacagctacgtgacccccatctgcatcgccgacaaggagtacaccaacatcttcctgaagttcggcagcggctacgtgagcggctggggccgggtgttccacaagggccggagcgccctggtgctgcagtacctgcgggtgcccctggtggaccgggccacctgcctgcggagcaccaagttcaccatctacaacaacatgttctgcgccggcttccacgagggcggccgggacagctgccagggcgacagcggcggcccccacgtgaccgaggtggagggcaccagcttcctgaccggcatcatcagctggggcgaggagtgcgccatgaagggcaagtacggcatctacaccaaggtgagccggtacgtgaactggatcaaggagaagaccaagctgacc

SEQ ID NO: 521 - DNA, 1245 bp, Artificial Sequence
  human FIX R318Y/R338E/T343R -FIX mature codon optimized for human 0.5 optimization
tataattcaggcaaactggaagagtttgtgcaggggaacctggagagagaatgtatggaagaaaagtgtagttttgaagaagcacgagaagtgtttgaaaacactgaaagaacaactgaattttggaagcagtatgtggatggagatcagtgtgagtccaatccatgtctgaatggcggcagttgcaaggatgacattaattcctatgaatgttggtgtccctttggatttgaaggaaagaactgtgaactggatgtgacatgtaacattaagaatggcagatgcgagcagttttgtaaaaatagtgctgataacaaggtggtgtgctcctgtactgagggatatcgactggcagaaaaccagaagtcctgtgaaccagcagtgccatttccatgtggaagagtgtctgtgtcacagacttctaagctgacccgggctgagactgtgtttcctgatgtggactatgtgaattctactgaagctgaaaccattctggataacatcactcagagcacccagtcatttaatgacttcactcgggtggtgggcggagaagatgccaaaccaggccagttcccttggcaggtggtgctgaatggcaaagtggatgcattctgtggaggctctatcgtgaatgaaaaatggattgtgactgctgcccactgtgtggaaactggcgtgaaaattacagtggtcgcaggcgaacataatattgaggagacagaacatacagagcagaagcgaaatgtgattcgaattattcctcaccacaactacaatgcagctattaataagtacaaccatgacattgccctgctggaactggacgaacccctggtgctgaacagctacgtgacacctatttgcattgctgacaaggaatacaccaacatcttcctgaaatttggatctggctatgtgagtggctggggaagagtcttccacaaagggtactcagctctggtgctgcagtacctgagagtgccactggtggaccgagccacatgtctggagtctacaaagttccggatctataacaacatgttctgtgctggcttccatgaaggaggcagagattcatgtcagggagatagtgggggaccccatgtgactgaagtggaagggaccagtttcctgactggaattattagctggggcgaagagtgtgcaatgaaaggcaaatatggaatctataccaaggtgtcccggtatgtcaactggattaaggaaaaaacaaagctgact

SEQ ID NO: 522 - DNA, 1245 bp, Artificial Sequence
  human FIX R318Y/R338E/T343R -FIX mature codon optimized for human 0.8 optimization
tacaatagcggcaagctggaggagtttgtgcagggcaacctggagagagagtgtatggaggagaagtgtagctttgaggaggcccgggaggtgtttgagaacaccgagagaaccaccgagttttggaagcagtacgtggatggcgatcagtgtgagtccaatccatgtctgaatggcggcagctgcaaggatgacatcaattcctacgagtgttggtgtccctttggctttgagggcaagaactgtgagctggatgtgacctgtaacatcaagaatggcagatgcgagcagttttgtaagaatagcgccgataacaaggtggtgtgctcctgtaccgagggctaccggctggccgagaaccagaagtcctgtgagccagccgtgccatttccatgtggcagagtgagcgtgagccagaccagcaagctgacccgggccgagaccgtgtttcctgatgtggactacgtgaatagcaccgaggccgagaccatcctggataacatcacccagagcacccagagctttaatgacttcacccgggtggtgggcggcgaggatgccaagccaggccagttcccttggcaggtggtgctgaatggcaaggtggatgccttctgtggcggcagcatcgtgaatgagaagtggatcgtgaccgccgcccactgtgtggagaccggcgtgaagatcaccgtggtggccggcgagcacaatatcgaggagaccgagcacaccgagcagaagcggaatgtgatccggatcatccctcaccacaactacaatgccgccatcaataagtacaaccacgacatcgccctgctggagctggacgagcccctggtgctgaacagctacgtgacccctatctgcatcgccgacaaggagtacaccaacatcttcctgaagtttggcagcggctacgtgagcggctggggcagagtgttccacaagggctacagcgccctggtgctgcagtacctgagagtgccactggtggaccgggccacctgtctggagagcaccaagttccggatctacaacaacatgttctgtgccggcttccacgagggcggcagagatagctgtcagggcgatagcggcggcccccacgtgaccgaggtggagggcaccagcttcctgaccggcatcatcagctggggcgaggagtgtgccatgaagggcaagtacggcatctacaccaaggtgtcccggtacgtgaactggatcaaggagaagaccaagctgacc

SEQ ID NO: 523 - DNA, 1245 bp, Artificial Sequence
  human FIX R318Y/R338E/T343R -FIX mature codon optimized for human 1.0 optimization
tacaacagcggcaagctggaggagttcgtgcagggcaacctggagcgggagtgcatggaggagaagtgcagcttcgaggaggcccgggaggtgttcgagaacaccgagcggaccaccgagttctggaagcagtacgtggacggcgaccagtgcgagagcaacccctgcctgaacggcggcagctgcaaggacgacatcaacagctacgagtgctggtgccccttcggcttcgagggcaagaactgcgagctggacgtgacctgcaacatcaagaacggccggtgcgagcagttctgcaagaacagcgccgacaacaaggtggtgtgcagctgcaccgagggctaccggctggccgagaaccagaagagctgcgagcccgccgtgcccttcccctgcggccgggtgagcgtgagccagaccagcaagctgacccgggccgagaccgtgttccccgacgtggactacgtgaacagcaccgaggccgagaccatcctggacaacatcacccagagcacccagagcttcaacgacttcacccgggtggtgggcggcgaggacgccaagcccggccagttcccctggcaggtggtgctgaacggcaaggtggacgccttctgcggcggcagcatcgtgaacgagaagtggatcgtgaccgccgcccactgcgtggagaccggcgtgaagatcaccgtggtggccggcgagcacaacatcgaggagaccgagcacaccgagcagaagcggaacgtgatccggatcatcccccaccacaactacaacgccgccatcaacaagtacaaccacgacatcgccctgctggagctggacgagcccctggtgctgaacagctacgtgacccccatctgcatcgccgacaaggagtacaccaacatcttcctgaagttcggcagcggctacgtgagcggctggggccgggtgttccacaagggctacagcgccctggtgctgcagtacctgcgggtgcccctggtggaccgggccacctgcctggagagcaccaagttccggatctacaacaacatgttctgcgccggcttccacgagggcggccgggacagctgccagggcgacagcggcggcccccacgtgaccgaggtggagggcaccagcttcctgaccggcatcatcagctggggcgaggagtgcgccatgaagggcaagtacggcatctacaccaaggtgagccggtacgtgaactggatcaaggagaagaccaagctgacc

SEQ ID NO: 524 - DNA, 1245 bp, Artificial Sequence
  human FIX R338L-FIX mature codon optimized for human 0.5 optimization
tataattcaggcaaactggaagagtttgtgcaggggaacctggagagagaatgtatggaagaaaagtgtagttttgaagaagcacgagaagtgtttgaaaacactgaaagaacaactgaattttggaagcagtatgtggatggagatcagtgtgagtccaatccatgtctgaatggcggcagttgcaaggatgacattaattcctatgaatgttggtgtccctttggatttgaaggaaagaactgtgaactggatgtgacatgtaacattaagaatggcagatgcgagcagttttgtaaaaatagtgctgataacaaggtggtgtgctcctgtactgagggatatcgactggcagaaaaccagaagtcctgtgaaccagcagtgccatttccatgtggaagagtgtctgtgtcacagacttctaagctgacccgggctgagactgtgtttcctgatgtggactatgtgaattctactgaagctgaaaccattctggataacatcactcagagcacccagtcatttaatgacttcactcgggtggtgggcggagaagatgccaaaccaggccagttcccttggcaggtggtgctgaatggcaaagtggatgcattctgtggaggctctatcgtgaatgaaaaatggattgtgactgctgcccactgtgtggaaactggcgtgaaaattacagtggtcgcaggcgaacataatattgaggagacagaacatacagagcagaagcgaaatgtgattcgaattattcctcaccacaactacaatgcagctattaataagtacaaccatgacattgccctgctggaactggacgaacccctggtgctgaacagctacgtgacacctatttgcattgctgacaaggaatacaccaacatcttcctgaaatttggatctggctatgtgagtggctggggaagagtcttccacaaagggagatcagctctggtgctgcagtacctgagagtgccactggtggaccgagccacatgtctgctgtctacaaagttcaccatctataacaacatgttctgtgctggcttccatgaaggaggcagagattcatgtcagggagatagtgggggaccccatgtgactgaagtggaagggaccagtttcctgactggaattattagctggggcgaagagtgtgcaatgaaaggcaaatatggaatctataccaaggtgtcccggtatgtcaactggattaaggaaaaaacaaagctgact

SEQ ID NO: 525 - DNA, 1245 bp, Artificial Sequence
  human FIX R338L-FIX mature codon optimized for human 0.8 optimization
tacaatagcggcaagctggaggagtttgtgcagggcaacctggagagagagtgtatggaggagaagtgtagctttgaggaggcccgggaggtgtttgagaacaccgagagaaccaccgagttttggaagcagtacgtggatggcgatcagtgtgagtccaatccatgtctgaatggcggcagctgcaaggatgacatcaattcctacgagtgttggtgtccctttggctttgagggcaagaactgtgagctggatgtgacctgtaacatcaagaatggcagatgcgagcagttttgtaagaatagcgccgataacaaggtggtgtgctcctgtaccgagggctaccggctggccgagaaccagaagtcctgtgagccagccgtgccatttccatgtggcagagtgagcgtgagccagaccagcaagctgacccgggccgagaccgtgtttcctgatgtggactacgtgaatagcaccgaggccgagaccatcctggataacatcacccagagcacccagagctttaatgacttcacccgggtggtgggcggcgaggatgccaagccaggccagttcccttggcaggtggtgctgaatggcaaggtggatgccttctgtggcggcagcatcgtgaatgagaagtggatcgtgaccgccgcccactgtgtggagaccggcgtgaagatcaccgtggtggccggcgagcacaatatcgaggagaccgagcacaccgagcagaagcggaatgtgatccggatcatccctcaccacaactacaatgccgccatcaataagtacaaccacgacatcgccctgctggagctggacgagcccctggtgctgaacagctacgtgacccctatctgcatcgccgacaaggagtacaccaacatcttcctgaagtttggcagcggctacgtgagcggctggggcagagtgttccacaagggcagaagcgccctggtgctgcagtacctgagagtgccactggtggaccgggccacctgtctgctgagcaccaagttcaccatctacaacaacatgttctgtgccggcttccacgagggcggcagagatagctgtcagggcgatagcggcggcccccacgtgaccgaggtggagggcaccagcttcctgaccggcatcatcagctggggcgaggagtgtgccatgaagggcaagtacggcatctacaccaaggtgtcccggtacgtgaactggatcaaggagaagaccaagctgacc

SEQ ID NO: 526 - DNA, 1245 bp, Artificial Sequence
  human FIX R338L mature codon optimized for human 1.0 optimization
tacaacagcggcaagctggaggagttcgtgcagggcaacctggagcgggagtgcatggaggagaagtgcagcttcgaggaggcccgggaggtgttcgagaacaccgagcggaccaccgagttctggaagcagtacgtggacggcgaccagtgcgagagcaacccctgcctgaacggcggcagctgcaaggacgacatcaacagctacgagtgctggtgccccttcggcttcgagggcaagaactgcgagctggacgtgacctgcaacatcaagaacggccggtgcgagcagttctgcaagaacagcgccgacaacaaggtggtgtgcagctgcaccgagggctaccggctggccgagaaccagaagagctgcgagcccgccgtgcccttcccctgcggccgggtgagcgtgagccagaccagcaagctgacccgggccgagaccgtgttccccgacgtggactacgtgaacagcaccgaggccgagaccatcctggacaacatcacccagagcacccagagcttcaacgacttcacccgggtggtgggcggcgaggacgccaagcccggccagttcccctggcaggtggtgctgaacggcaaggtggacgccttctgcggcggcagcatcgtgaacgagaagtggatcgtgaccgccgcccactgcgtggagaccggcgtgaagatcaccgtggtggccggcgagcacaacatcgaggagaccgagcacaccgagcagaagcggaacgtgatccggatcatcccccaccacaactacaacgccgccatcaacaagtacaaccacgacatcgccctgctggagctggacgagcccctggtgctgaacagctacgtgacccccatctgcatcgccgacaaggagtacaccaacatcttcctgaagttcggcagcggctacgtgagcggctggggccgggtgttccacaagggccggagcgccctggtgctgcagtacctgcgggtgcccctggtggaccgggccacctgcctgctgagcaccaagttcaccatctacaacaacatgttctgcgccggcttccacgagggcggccgggacagctgccagggcgacagcggcggcccccacgtgaccgaggtggagggcaccagcttcctgaccggcatcatcagctggggcgaggagtgcgccatgaagggcaagtacggcatctacaccaaggtgagccggtacgtgaactggatcaaggagaagaccaagctgacc

SEQ ID NO: 527 - DNA, 1296 bp, Artificial Sequence
  hWT-FIX codon optimized for human 0.5 optimization
gtgtttctggatcatgaaaacgccaacaaaattctgaatcggccaaagaggtataattcaggcaaactggaagagtttgtgcaggggaacctggagagagaatgtatggaagaaaagtgtagttttgaagaagcacgagaagtgtttgaaaacactgaaagaacaactgaattttggaagcagtatgtggatggagatcagtgtgagtccaatccatgtctgaatggcggcagttgcaaggatgacattaattcctatgaatgttggtgtccctttggatttgaaggaaagaactgtgaactggatgtgacatgtaacattaagaatggcagatgcgagcagttttgtaaaaatagtgctgataacaaggtggtgtgctcctgtactgagggatatcgactggcagaaaaccagaagtcctgtgaaccagcagtgccatttccatgtggaagagtgtctgtgtcacagacttctaagctgacccgggctgagactgtgtttcctgatgtggactatgtgaattctactgaagctgaaaccattctggataacatcactcagagcacccagtcatttaatgacttcactcgggtggtgggcggagaagatgccaaaccaggccagttcccttggcaggtggtgctgaatggcaaagtggatgcattctgtggaggctctatcgtgaatgaaaaatggattgtgactgctgcccactgtgtggaaactggcgtgaaaattacagtggtcgcaggcgaacataatattgaggagacagaacatacagagcagaagcgaaatgtgattcgaattattcctcaccacaactacaatgcagctattaataagtacaaccatgacattgccctgctggaactggacgaacccctggtgctgaacagctacgtgacacctatttgcattgctgacaaggaatacaccaacatcttcctgaaatttggatctggctatgtgagtggctggggaagagtcttccacaaagggagatcagctctggtgctgcagtacctgagagtgccactggtggaccgagccacatgtctgcgatctacaaagttcaccatctataacaacatgttctgtgctggcttccatgaaggaggcagagattcatgtcagggagatagtgggggaccccatgtgactgaagtggaagggaccagtttcctgactggaattattagctggggcgaagagtgtgcaatgaaaggcaaatatggaatctataccaaggtgtcccggtatgtcaactggattaaggaaaaaacaaagctgact

SEQ ID NO: 528 - DNA, 1296 bp, Artificial Sequence
  hWT-FIX codon optimized for human 0.8 optimization
gtgtttctggatcacgagaacgccaacaagatcctgaatcggccaaagaggtacaatagcggcaagctggaggagtttgtgcagggcaacctggagagagagtgtatggaggagaagtgtagctttgaggaggcccgggaggtgtttgagaacaccgagagaaccaccgagttttggaagcagtacgtggatggcgatcagtgtgagtccaatccatgtctgaatggcggcagctgcaaggatgacatcaattcctacgagtgttggtgtccctttggctttgagggcaagaactgtgagctggatgtgacctgtaacatcaagaatggcagatgcgagcagttttgtaagaatagcgccgataacaaggtggtgtgctcctgtaccgagggctaccggctggccgagaaccagaagtcctgtgagccagccgtgccatttccatgtggcagagtgagcgtgagccagaccagcaagctgacccgggccgagaccgtgtttcctgatgtggactacgtgaatagcaccgaggccgagaccatcctggataacatcacccagagcacccagagctttaatgacttcacccgggtggtgggcggcgaggatgccaagccaggccagttcccttggcaggtggtgctgaatggcaaggtggatgccttctgtggcggcagcatcgtgaatgagaagtggatcgtgaccgccgcccactgtgtggagaccggcgtgaagatcaccgtggtggccggcgagcacaatatcgaggagaccgagcacaccgagcagaagcggaatgtgatccggatcatccctcaccacaactacaatgccgccatcaataagtacaaccacgacatcgccctgctggagctggacgagcccctggtgctgaacagctacgtgacccctatctgcatcgccgacaaggagtacaccaacatcttcctgaagtttggcagcggctacgtgagcggctggggcagagtgttccacaagggcagaagcgccctggtgctgcagtacctgagagtgccactggtggaccgggccacctgtctgcggagcaccaagttcaccatctacaacaacatgttctgtgccggcttccacgagggcggcagagatagctgtcagggcgatagcggcggcccccacgtgaccgaggtggagggcaccagcttcctgaccggcatcatcagctggggcgaggagtgtgccatgaagggcaagtacggcatctacaccaaggtgtcccggtacgtgaactggatcaaggagaagaccaagctgacc

SEQ ID NO: 529 - DNA, 1296 bp, Artificial Sequence
  hWT-FIX codon optimized for human 1.0 optimization
gtgttcctggaccacgagaacgccaacaagatcctgaaccggcccaagcggtacaacagcggcaagctggaggagttcgtgcagggcaacctggagcgggagtgcatggaggagaagtgcagcttcgaggaggcccgggaggtgttcgagaacaccgagcggaccaccgagttctggaagcagtacgtggacggcgaccagtgcgagagcaacccctgcctgaacggcggcagctgcaaggacgacatcaacagctacgagtgctggtgccccttcggcttcgagggcaagaactgcgagctggacgtgacctgcaacatcaagaacggccggtgcgagcagttctgcaagaacagcgccgacaacaaggtggtgtgcagctgcaccgagggctaccggctggccgagaaccagaagagctgcgagcccgccgtgcccttcccctgcggccgggtgagcgtgagccagaccagcaagctgacccgggccgagaccgtgttccccgacgtggactacgtgaacagcaccgaggccgagaccatcctggacaacatcacccagagcacccagagcttcaacgacttcacccgggtggtgggcggcgaggacgccaagcccggccagttcccctggcaggtggtgctgaacggcaaggtggacgccttctgcggcggcagcatcgtgaacgagaagtggatcgtgaccgccgcccactgcgtggagaccggcgtgaagatcaccgtggtggccggcgagcacaacatcgaggagaccgagcacaccgagcagaagcggaacgtgatccggatcatcccccaccacaactacaacgccgccatcaacaagtacaaccacgacatcgccctgctggagctggacgagcccctggtgctgaacagctacgtgacccccatctgcatcgccgacaaggagtacaccaacatcttcctgaagttcggcagcggctacgtgagcggctggggccgggtgttccacaagggccggagcgccctggtgctgcagtacctgcgggtgcccctggtggaccgggccacctgcctgcggagcaccaagttcaccatctacaacaacatgttctgcgccggcttccacgagggcggccgggacagctgccagggcgacagcggcggcccccacgtgaccgaggtggagggcaccagcttcctgaccggcatcatcagctggggcgaggagtgcgccatgaagggcaagtacggcatctacaccaaggtgagccggtacgtgaactggatcaaggagaagaccaagctgacc

SEQ ID NO: 530 - DNA, 1296 bp, Artificial Sequence
  human FIX R318Y/R338E/T343R -FIX codon optimized for human 0.5 optimization
gtgtttctggatcatgaaaacgccaacaaaattctgaatcggccaaagaggtataattcaggcaaactggaagagtttgtgcaggggaacctggagagagaatgtatggaagaaaagtgtagttttgaagaagcacgagaagtgtttgaaaacactgaaagaacaactgaattttggaagcagtatgtggatggagatcagtgtgagtccaatccatgtctgaatggcggcagttgcaaggatgacattaattcctatgaatgttggtgtccctttggatttgaaggaaagaactgtgaactggatgtgacatgtaacattaagaatggcagatgcgagcagttttgtaaaaatagtgctgataacaaggtggtgtgctcctgtactgagggatatcgactggcagaaaaccagaagtcctgtgaaccagcagtgccatttccatgtggaagagtgtctgtgtcacagacttctaagctgacccgggctgagactgtgtttcctgatgtggactatgtgaattctactgaagctgaaaccattctggataacatcactcagagcacccagtcatttaatgacttcactcgggtggtgggcggagaagatgccaaaccaggccagttcccttggcaggtggtgctgaatggcaaagtggatgcattctgtggaggctctatcgtgaatgaaaaatggattgtgactgctgcccactgtgtggaaactggcgtgaaaattacagtggtcgcaggcgaacataatattgaggagacagaacatacagagcagaagcgaaatgtgattcgaattattcctcaccacaactacaatgcagctattaataagtacaaccatgacattgccctgctggaactggacgaacccctggtgctgaacagctacgtgacacctatttgcattgctgacaaggaatacaccaacatcttcctgaaatttggatctggctatgtgagtggctggggaagagtcttccacaaagggtactcagctctggtgctgcagtacctgagagtgccactggtggaccgagccacatgtctggagtctacaaagttccggatctataacaacatgttctgtgctggcttccatgaaggaggcagagattcatgtcagggagatagtgggggaccccatgtgactgaagtggaagggaccagtttcctgactggaattattagctggggcgaagagtgtgcaatgaaaggcaaatatggaatctataccaaggtgtcccggtatgtcaactggattaaggaaaaaacaaagctgact

SEQ ID NO: 531 - DNA, 1296 bp, Artificial Sequence
  human FIX R318Y/R338E/T343R -FIX codon optimized for human 0.8 optimization
gtgtttctggatcacgagaacgccaacaagatcctgaatcggccaaagaggtacaatagcggcaagctggaggagtttgtgcagggcaacctggagagagagtgtatggaggagaagtgtagctttgaggaggcccgggaggtgtttgagaacaccgagagaaccaccgagttttggaagcagtacgtggatggcgatcagtgtgagtccaatccatgtctgaatggcggcagctgcaaggatgacatcaattcctacgagtgttggtgtccctttggctttgagggcaagaactgtgagctggatgtgacctgtaacatcaagaatggcagatgcgagcagttttgtaagaatagcgccgataacaaggtggtgtgctcctgtaccgagggctaccggctggccgagaaccagaagtcctgtgagccagccgtgccatttccatgtggcagagtgagcgtgagccagaccagcaagctgacccgggccgagaccgtgtttcctgatgtggactacgtgaatagcaccgaggccgagaccatcctggataacatcacccagagcacccagagctttaatgacttcacccgggtggtgggcggcgaggatgccaagccaggccagttcccttggcaggtggtgctgaatggcaaggtggatgccttctgtggcggcagcatcgtgaatgagaagtggatcgtgaccgccgcccactgtgtggagaccggcgtgaagatcaccgtggtggccggcgagcacaatatcgaggagaccgagcacaccgagcagaagcggaatgtgatccggatcatccctcaccacaactacaatgccgccatcaataagtacaaccacgacatcgccctgctggagctggacgagcccctggtgctgaacagctacgtgacccctatctgcatcgccgacaaggagtacaccaacatcttcctgaagtttggcagcggctacgtgagcggctggggcagagtgttccacaagggctacagcgccctggtgctgcagtacctgagagtgccactggtggaccgggccacctgtctggagagcaccaagttccggatctacaacaacatgttctgtgccggcttccacgagggcggcagagatagctgtcagggcgatagcggcggcccccacgtgaccgaggtggagggcaccagcttcctgaccggcatcatcagctggggcgaggagtgtgccatgaagggcaagtacggcatctacaccaaggtgtcccggtacgtgaactggatcaaggagaagaccaagctgacc

SEQ ID NO: 532 - DNA, 1296 bp, Artificial Sequence
  human FIX R318Y/R338E/T343R -FIX codon optimized for human 1.0 optimization
gtgttcctggaccacgagaacgccaacaagatcctgaaccggcccaagcggtacaacagcggcaagctggaggagttcgtgcagggcaacctggagcgggagtgcatggaggagaagtgcagcttcgaggaggcccgggaggtgttcgagaacaccgagcggaccaccgagttctggaagcagtacgtggacggcgaccagtgcgagagcaacccctgcctgaacggcggcagctgcaaggacgacatcaacagctacgagtgctggtgccccttcggcttcgagggcaagaactgcgagctggacgtgacctgcaacatcaagaacggccggtgcgagcagttctgcaagaacagcgccgacaacaaggtggtgtgcagctgcaccgagggctaccggctggccgagaaccagaagagctgcgagcccgccgtgcccttcccctgcggccgggtgagcgtgagccagaccagcaagctgacccgggccgagaccgtgttccccgacgtggactacgtgaacagcaccgaggccgagaccatcctggacaacatcacccagagcacccagagcttcaacgacttcacccgggtggtgggcggcgaggacgccaagcccggccagttcccctggcaggtggtgctgaacggcaaggtggacgccttctgcggcggcagcatcgtgaacgagaagtggatcgtgaccgccgcccactgcgtggagaccggcgtgaagatcaccgtggtggccggcgagcacaacatcgaggagaccgagcacaccgagcagaagcggaacgtgatccggatcatcccccaccacaactacaacgccgccatcaacaagtacaaccacgacatcgccctgctggagctggacgagcccctggtgctgaacagctacgtgacccccatctgcatcgccgacaaggagtacaccaacatcttcctgaagttcggcagcggctacgtgagcggctggggccgggtgttccacaagggctacagcgccctggtgctgcagtacctgcgggtgcccctggtggaccgggccacctgcctggagagcaccaagttccggatctacaacaacatgttctgcgccggcttccacgagggcggccgggacagctgccagggcgacagcggcggcccccacgtgaccgaggtggagggcaccagcttcctgaccggcatcatcagctggggcgaggagtgcgccatgaagggcaagtacggcatctacaccaaggtgagccggtacgtgaactggatcaaggagaagaccaagctgacc

SEQ ID NO: 533 - DNA, 1296 bp, Artificial Sequence
  human FIX R338L-FIX codon optimized for human 0.5 optimization
gtgtttctggatcatgaaaacgccaacaaaattctgaatcggccaaagaggtataattcaggcaaactggaagagtttgtgcaggggaacctggagagagaatgtatggaagaaaagtgtagttttgaagaagcacgagaagtgtttgaaaacactgaaagaacaactgaattttggaagcagtatgtggatggagatcagtgtgagtccaatccatgtctgaatggcggcagttgcaaggatgacattaattcctatgaatgttggtgtccctttggatttgaaggaaagaactgtgaactggatgtgacatgtaacattaagaatggcagatgcgagcagttttgtaaaaatagtgctgataacaaggtggtgtgctcctgtactgagggatatcgactggcagaaaaccagaagtcctgtgaaccagcagtgccatttccatgtggaagagtgtctgtgtcacagacttctaagctgacccgggctgagactgtgtttcctgatgtggactatgtgaattctactgaagctgaaaccattctggataacatcactcagagcacccagtcatttaatgacttcactcgggtggtgggcggagaagatgccaaaccaggccagttcccttggcaggtggtgctgaatggcaaagtggatgcattctgtggaggctctatcgtgaatgaaaaatggattgtgactgctgcccactgtgtggaaactggcgtgaaaattacagtggtcgcaggcgaacataatattgaggagacagaacatacagagcagaagcgaaatgtgattcgaattattcctcaccacaactacaatgcagctattaataagtacaaccatgacattgccctgctggaactggacgaacccctggtgctgaacagctacgtgacacctatttgcattgctgacaaggaatacaccaacatcttcctgaaatttggatctggctatgtgagtggctggggaagagtcttccacaaagggagatcagctctggtgctgcagtacctgagagtgccactggtggaccgagccacatgtctgctgtctacaaagttcaccatctataacaacatgttctgtgctggcttccatgaaggaggcagagattcatgtcagggagatagtgggggaccccatgtgactgaagtggaagggaccagtttcctgactggaattattagctggggcgaagagtgtgcaatgaaaggcaaatatggaatctataccaaggtgtcccggtatgtcaactggattaaggaaaaaacaaagctgact

SEQ ID NO: 534 - DNA, 1296 bp, Artificial Sequence
  human FIX R338L-FIX codon optimized for human 0.8 optimization
gtgtttctggatcacgagaacgccaacaagatcctgaatcggccaaagaggtacaatagcggcaagctggaggagtttgtgcagggcaacctggagagagagtgtatggaggagaagtgtagctttgaggaggcccgggaggtgtttgagaacaccgagagaaccaccgagttttggaagcagtacgtggatggcgatcagtgtgagtccaatccatgtctgaatggcggcagctgcaaggatgacatcaattcctacgagtgttggtgtccctttggctttgagggcaagaactgtgagctggatgtgacctgtaacatcaagaatggcagatgcgagcagttttgtaagaatagcgccgataacaaggtggtgtgctcctgtaccgagggctaccggctggccgagaaccagaagtcctgtgagccagccgtgccatttccatgtggcagagtgagcgtgagccagaccagcaagctgacccgggccgagaccgtgtttcctgatgtggactacgtgaatagcaccgaggccgagaccatcctggataacatcacccagagcacccagagctttaatgacttcacccgggtggtgggcggcgaggatgccaagccaggccagttcccttggcaggtggtgctgaatggcaaggtggatgccttctgtggcggcagcatcgtgaatgagaagtggatcgtgaccgccgcccactgtgtggagaccggcgtgaagatcaccgtggtggccggcgagcacaatatcgaggagaccgagcacaccgagcagaagcggaatgtgatccggatcatccctcaccacaactacaatgccgccatcaataagtacaaccacgacatcgccctgctggagctggacgagcccctggtgctgaacagctacgtgacccctatctgcatcgccgacaaggagtacaccaacatcttcctgaagtttggcagcggctacgtgagcggctggggcagagtgttccacaagggcagaagcgccctggtgctgcagtacctgagagtgccactggtggaccgggccacctgtctgctgagcaccaagttcaccatctacaacaacatgttctgtgccggcttccacgagggcggcagagatagctgtcagggcgatagcggcggcccccacgtgaccgaggtggagggcaccagcttcctgaccggcatcatcagctggggcgaggagtgtgccatgaagggcaagtacggcatctacaccaaggtgtcccggtacgtgaactggatcaaggagaagaccaagctgacc

SEQ ID NO: 535 - DNA, 1296 bp, Artificial Sequence
  human FIX R338L-FIX codon optimized for human 1.0 optimization
gtgttcctggaccacgagaacgccaacaagatcctgaaccggcccaagcggtacaacagcggcaagctggaggagttcgtgcagggcaacctggagcgggagtgcatggaggagaagtgcagcttcgaggaggcccgggaggtgttcgagaacaccgagcggaccaccgagttctggaagcagtacgtggacggcgaccagtgcgagagcaacccctgcctgaacggcggcagctgcaaggacgacatcaacagctacgagtgctggtgccccttcggcttcgagggcaagaactgcgagctggacgtgacctgcaacatcaagaacggccggtgcgagcagttctgcaagaacagcgccgacaacaaggtggtgtgcagctgcaccgagggctaccggctggccgagaaccagaagagctgcgagcccgccgtgcccttcccctgcggccgggtgagcgtgagccagaccagcaagctgacccgggccgagaccgtgttccccgacgtggactacgtgaacagcaccgaggccgagaccatcctggacaacatcacccagagcacccagagcttcaacgacttcacccgggtggtgggcggcgaggacgccaagcccggccagttcccctggcaggtggtgctgaacggcaaggtggacgccttctgcggcggcagcatcgtgaacgagaagtggatcgtgaccgccgcccactgcgtggagaccggcgtgaagatcaccgtggtggccggcgagcacaacatcgaggagaccgagcacaccgagcagaagcggaacgtgatccggatcatcccccaccacaactacaacgccgccatcaacaagtacaaccacgacatcgccctgctggagctggacgagcccctggtgctgaacagctacgtgacccccatctgcatcgccgacaaggagtacaccaacatcttcctgaagttcggcagcggctacgtgagcggctggggccgggtgttccacaagggccggagcgccctggtgctgcagtacctgcgggtgcccctggtggaccgggccacctgcctgctgagcaccaagttcaccatctacaacaacatgttctgcgccggcttccacgagggcggccgggacagctgccagggcgacagcggcggcccccacgtgaccgaggtggagggcaccagcttcctgaccggcatcatcagctggggcgaggagtgcgccatgaagggcaagtacggcatctacaccaaggtgagccggtacgtgaactggatcaaggagaagaccaagctgacc

SEQ ID NO: 536 - DNA, 2821 bp, Artificial Sequence
  hFIXss-Pro-mini Intron-Pro-human wild type FIX optimized 0.5
atgcagcgcgtgaacatgatcatggcagaatcaccaggcctcatcaccatctgccttttaggatatctactcagtgctgaatgtacaggtttgtttccttttttaaaatacattgagtatgcttgccttttagatatagaaatatctgatgctgtcttcttcactaaattttgattacatgatttgacagcaatattgaagagtctaacagccagcacgcaggttggtaagtactggttctttgttagctaggttttcttcttcttcatttttaaaactaaatagatcgacaatgcttatgatgcatttatgtttaataaacactgttcagttcatgatttggtcatgtaattcctgttagaaaacattcatctccttggtttaaaaaaattaaaagtgggaaaacaaagaaatagcagaatatagtgaaaaaaaataaccacattatttttgtttggacttaccactttgaaatcaaaatgggaaacaaaagcacaaacaatggccttatttacacaaaaagtctgattttaagatatatgacatttcaaggtttcagaagtatgtaatgaggtgtgtctctaattttttaaattatatatcttcaatttaaagttttagttaaaacataaagattaacctttcattagcaagctgttagttatcaccaaagcttttcatggattaggaaaaaatcattttgtctctatgtcaaacatcttggagttgatatttggggaaacacaatactcagttgagttccctaggggagaaaagcaagcttaagaattgacataaagagtaggaagttagctaatgcaacatatatcactttgttttttcacaactacagtgactttatgtatttcccagaggaaggcatacagggaagaaattatcccatttggacaaacagcatgttctcacaggaagcatttatcacacttacttgtcaactttctagaatcaaatctagtagctgacagtaccaggatcaggggtgccaaccctaagcacccccagaaagctgactggccctgtggttcccactccagacatgatgtcagctgtgaaatcgacgtcgctggaccataattaggcttctgttcttcaggagacatttgttcaaagtcatttgggcaaccatattctgaaaacagcccagccagggtgatggatcactttgcaaagatcctcaatgagctattttcaagtgatgacaaagtgtgaagttaaccgctcatttgagaactttctttttcatccaaagtaaattcaaatatgattagaaatctgaccttttattactggaattctcttgactaaaagtaaaattgaattttaattcctaaatctccatgtgtatacagtactgtgggaacatcacagattttggctccatgccctaaagagaaattggctttcagattatttggattaaaaacaaagactttcttaagagatgtaaaattttcatgatgttttcttttttgctaaaactaaagaattattcttttacatttcagtgtttctggatcatgaaaacgccaacaaaattctgaatcggccaaagaggtataattcaggcaaactggaagagtttgtgcaggggaacctggagagagaatgtatggaagaaaagtgtagttttgaagaagcacgagaagtgtttgaaaacactgaaagaacaactgaattttggaagcagtatgtggatggagatcagtgtgagtccaatccatgtctgaatggcggcagttgcaaggatgacattaattcctatgaatgttggtgtccctttggatttgaaggaaagaactgtgaactggatgtgacatgtaacattaagaatggcagatgcgagcagttttgtaaaaatagtgctgataacaaggtggtgtgctcctgtactgagggatatcgactggcagaaaaccagaagtcctgtgaaccagcagtgccatttccatgtggaagagtgtctgtgtcacagacttctaagctgacccgggctgagactgtgtttcctgatgtggactatgtgaattctactgaagctgaaaccattctggataacatcactcagagcacccagtcatttaatgacttcactcgggtggtgggcggagaagatgccaaaccaggccagttcccttggcaggtggtgctgaatggcaaagtggatgcattctgtggaggctctatcgtgaatgaaaaatggattgtgactgctgcccactgtgtggaaactggcgtgaaaattacagtggtcgcaggcgaacataatattgaggagacagaacatacagagcagaagcgaaatgtgattcgaattattcctcaccacaactacaatgcagctattaataagtacaaccatgacattgccctgctggaactggacgaacccctggtgctgaacagctacgtgacacctatttgcattgctgacaaggaatacaccaacatcttcctgaaatttggatctggctatgtgagtggctggggaagagtcttccacaaagggagatcagctctggtgctgcagtacctgagagtgccactggtggaccgagccacatgtctgcgatctacaaagttcaccatctataacaacatgttctgtgctggcttccatgaaggaggcagagattcatgtcagggagatagtgggggaccccatgtgactgaagtggaagggaccagtttcctgactggaattattagctggggcgaagagtgtgcaatgaaaggcaaatatggaatctataccaaggtgtcccggtatgtcaactggattaaggaaaaaacaaagctgact

SEQ ID NO: 537 - DNA, 2821 bp, Artificial Sequence
  hFIXss-Pro-mini Intron-Pro-human wild type FIX optimized 0.8
atgcagcgcgtgaacatgatcatggcagaatcaccaggcctcatcaccatctgccttttaggatatctactcagtgctgaatgtacaggtttgtttccttttttaaaatacattgagtatgcttgccttttagatatagaaatatctgatgctgtcttcttcactaaattttgattacatgatttgacagcaatattgaagagtctaacagccagcacgcaggttggtaagtactggttctttgttagctaggttttcttcttcttcatttttaaaactaaatagatcgacaatgcttatgatgcatttatgtttaataaacactgttcagttcatgatttggtcatgtaattcctgttagaaaacattcatctccttggtttaaaaaaattaaaagtgggaaaacaaagaaatagcagaatatagtgaaaaaaaataaccacattatttttgtttggacttaccactttgaaatcaaaatgggaaacaaaagcacaaacaatggccttatttacacaaaaagtctgattttaagatatatgacatttcaaggtttcagaagtatgtaatgaggtgtgtctctaattttttaaattatatatcttcaatttaaagttttagttaaaacataaagattaacctttcattagcaagctgttagttatcaccaaagcttttcatggattaggaaaaaatcattttgtctctatgtcaaacatcttggagttgatatttggggaaacacaatactcagttgagttccctaggggagaaaagcaagcttaagaattgacataaagagtaggaagttagctaatgcaacatatatcactttgttttttcacaactacagtgactttatgtatttcccagaggaaggcatacagggaagaaattatcccatttggacaaacagcatgttctcacaggaagcatttatcacacttacttgtcaactttctagaatcaaatctagtagctgacagtaccaggatcaggggtgccaaccctaagcacccccagaaagctgactggccctgtggttcccactccagacatgatgtcagctgtgaaatcgacgtcgctggaccataattaggcttctgttcttcaggagacatttgttcaaagtcatttgggcaaccatattctgaaaacagcccagccagggtgatggatcactttgcaaagatcctcaatgagctattttcaagtgatgacaaagtgtgaagttaaccgctcatttgagaactttctttttcatccaaagtaaattcaaatatgattagaaatctgaccttttattactggaattctcttgactaaaagtaaaattgaattttaattcctaaatctccatgtgtatacagtactgtgggaacatcacagattttggctccatgccctaaagagaaattggctttcagattatttggattaaaaacaaagactttcttaagagatgtaaaattttcatgatgttttcttttttgctaaaactaaagaattattcttttacatttcagtgtttctggatcacgagaacgccaacaagatcctgaatcggccaaagaggtacaatagcggcaagctggaggagtttgtgcagggcaacctggagagagagtgtatggaggagaagtgtagctttgaggaggcccgggaggtgtttgagaacaccgagagaaccaccgagttttggaagcagtacgtggatggcgatcagtgtgagtccaatccatgtctgaatggcggcagctgcaaggatgacatcaattcctacgagtgttggtgtccctttggctttgagggcaagaactgtgagctggatgtgacctgtaacatcaagaatggcagatgcgagcagttttgtaagaatagcgccgataacaaggtggtgtgctcctgtaccgagggctaccggctggccgagaaccagaagtcctgtgagccagccgtgccatttccatgtggcagagtgagcgtgagccagaccagcaagctgacccgggccgagaccgtgtttcctgatgtggactacgtgaatagcaccgaggccgagaccatcctggataacatcacccagagcacccagagctttaatgacttcacccgggtggtgggcggcgaggatgccaagccaggccagttcccttggcaggtggtgctgaatggcaaggtggatgccttctgtggcggcagcatcgtgaatgagaagtggatcgtgaccgccgcccactgtgtggagaccggcgtgaagatcaccgtggtggccggcgagcacaatatcgaggagaccgagcacaccgagcagaagcggaatgtgatccggatcatccctcaccacaactacaatgccgccatcaataagtacaaccacgacatcgccctgctggagctggacgagcccctggtgctgaacagctacgtgacccctatctgcatcgccgacaaggagtacaccaacatcttcctgaagtttggcagcggctacgtgagcggctggggcagagtgttccacaagggcagaagcgccctggtgctgcagtacctgagagtgccactggtggaccgggccacctgtctgcggagcaccaagttcaccatctacaacaacatgttctgtgccggcttccacgagggcggcagagatagctgtcagggcgatagcggcggcccccacgtgaccgaggtggagggcaccagcttcctgaccggcatcatcagctggggcgaggagtgtgccatgaagggcaagtacggcatctacaccaaggtgtcccggtacgtgaactggatcaaggagaagaccaagctgacc

SEQ ID NO: 538 - DNA, 2821 bp, Artificial Sequence
  hFIXss-Pro-mini Intron-Pro-human wild type FIX optimized 1.0
atgcagcgcgtgaacatgatcatggcagaatcaccaggcctcatcaccatctgccttttaggatatctactcagtgctgaatgtacaggtttgtttccttttttaaaatacattgagtatgcttgccttttagatatagaaatatctgatgctgtcttcttcactaaattttgattacatgatttgacagcaatattgaagagtctaacagccagcacgcaggttggtaagtactggttctttgttagctaggttttcttcttcttcatttttaaaactaaatagatcgacaatgcttatgatgcatttatgtttaataaacactgttcagttcatgatttggtcatgtaattcctgttagaaaacattcatctccttggtttaaaaaaattaaaagtgggaaaacaaagaaatagcagaatatagtgaaaaaaaataaccacattatttttgtttggacttaccactttgaaatcaaaatgggaaacaaaagcacaaacaatggccttatttacacaaaaagtctgattttaagatatatgacatttcaaggtttcagaagtatgtaatgaggtgtgtctctaattttttaaattatatatcttcaatttaaagttttagttaaaacataaagattaacctttcattagcaagctgttagttatcaccaaagcttttcatggattaggaaaaaatcattttgtctctatgtcaaacatcttggagttgatatttggggaaacacaatactcagttgagttccctaggggagaaaagcaagcttaagaattgacataaagagtaggaagttagctaatgcaacatatatcactttgttttttcacaactacagtgactttatgtatttcccagaggaaggcatacagggaagaaattatcccatttggacaaacagcatgttctcacaggaagcatttatcacacttacttgtcaactttctagaatcaaatctagtagctgacagtaccaggatcaggggtgccaaccctaagcacccccagaaagctgactggccctgtggttcccactccagacatgatgtcagctgtgaaatcgacgtcgctggaccataattaggcttctgttcttcaggagacatttgttcaaagtcatttgggcaaccatattctgaaaacagcccagccagggtgatggatcactttgcaaagatcctcaatgagctattttcaagtgatgacaaagtgtgaagttaaccgctcatttgagaactttctttttcatccaaagtaaattcaaatatgattagaaatctgaccttttattactggaattctcttgactaaaagtaaaattgaattttaattcctaaatctccatgtgtatacagtactgtgggaacatcacagattttggctccatgccctaaagagaaattggctttcagattatttggattaaaaacaaagactttcttaagagatgtaaaattttcatgatgttttcttttttgctaaaactaaagaattattcttttacatttcagtgttcctggaccacgagaacgccaacaagatcctgaaccggcccaagcggtacaacagcggcaagctggaggagttcgtgcagggcaacctggagcgggagtgcatggaggagaagtgcagcttcgaggaggcccgggaggtgttcgagaacaccgagcggaccaccgagttctggaagcagtacgtggacggcgaccagtgcgagagcaacccctgcctgaacggcggcagctgcaaggacgacatcaacagctacgagtgctggtgccccttcggcttcgagggcaagaactgcgagctggacgtgacctgcaacatcaagaacggccggtgcgagcagttctgcaagaacagcgccgacaacaaggtggtgtgcagctgcaccgagggctaccggctggccgagaaccagaagagctgcgagcccgccgtgcccttcccctgcggccgggtgagcgtgagccagaccagcaagctgacccgggccgagaccgtgttccccgacgtggactacgtgaacagcaccgaggccgagaccatcctggacaacatcacccagagcacccagagcttcaacgacttcacccgggtggtgggcggcgaggacgccaagcccggccagttcccctggcaggtggtgctgaacggcaaggtggacgccttctgcggcggcagcatcgtgaacgagaagtggatcgtgaccgccgcccactgcgtggagaccggcgtgaagatcaccgtggtggccggcgagcacaacatcgaggagaccgagcacaccgagcagaagcggaacgtgatccggatcatcccccaccacaactacaacgccgccatcaacaagtacaaccacgacatcgccctgctggagctggacgagcccctggtgctgaacagctacgtgacccccatctgcatcgccgacaaggagtacaccaacatcttcctgaagttcggcagcggctacgtgagcggctggggccgggtgttccacaagggccggagcgccctggtgctgcagtacctgcgggtgcccctggtggaccgggccacctgcctgcggagcaccaagttcaccatctacaacaacatgttctgcgccggcttccacgagggcggccgggacagctgccagggcgacagcggcggcccccacgtgaccgaggtggagggcaccagcttcctgaccggcatcatcagctggggcgaggagtgcgccatgaagggcaagtacggcatctacaccaaggtgagccggtacgtgaactggatcaaggagaagaccaagctgacc

SEQ ID NO: 539 - DNA, 2821 bp, Artificial Sequence
  hFIXss-Pro-mini Intron-Pro-human FIX R318Y/R338E/T343R optimized 0.5
atgcagcgcgtgaacatgatcatggcagaatcaccaggcctcatcaccatctgccttttaggatatctactcagtgctgaatgtacaggtttgtttccttttttaaaatacattgagtatgcttgccttttagatatagaaatatctgatgctgtcttcttcactaaattttgattacatgatttgacagcaatattgaagagtctaacagccagcacgcaggttggtaagtactggttctttgttagctaggttttcttcttcttcatttttaaaactaaatagatcgacaatgcttatgatgcatttatgtttaataaacactgttcagttcatgatttggtcatgtaattcctgttagaaaacattcatctccttggtttaaaaaaattaaaagtgggaaaacaaagaaatagcagaatatagtgaaaaaaaataaccacattatttttgtttggacttaccactttgaaatcaaaatgggaaacaaaagcacaaacaatggccttatttacacaaaaagtctgattttaagatatatgacatttcaaggtttcagaagtatgtaatgaggtgtgtctctaattttttaaattatatatcttcaatttaaagttttagttaaaacataaagattaacctttcattagcaagctgttagttatcaccaaagcttttcatggattaggaaaaaatcattttgtctctatgtcaaacatcttggagttgatatttggggaaacacaatactcagttgagttccctaggggagaaaagcaagcttaagaattgacataaagagtaggaagttagctaatgcaacatatatcactttgttttttcacaactacagtgactttatgtatttcccagaggaaggcatacagggaagaaattatcccatttggacaaacagcatgttctcacaggaagcatttatcacacttacttgtcaactttctagaatcaaatctagtagctgacagtaccaggatcaggggtgccaaccctaagcacccccagaaagctgactggccctgtggttcccactccagacatgatgtcagctgtgaaatcgacgtcgctggaccataattaggcttctgttcttcaggagacatttgttcaaagtcatttgggcaaccatattctgaaaacagcccagccagggtgatggatcactttgcaaagatcctcaatgagctattttcaagtgatgacaaagtgtgaagttaaccgctcatttgagaactttctttttcatccaaagtaaattcaaatatgattagaaatctgaccttttattactggaattctcttgactaaaagtaaaattgaattttaattcctaaatctccatgtgtatacagtactgtgggaacatcacagattttggctccatgccctaaagagaaattggctttcagattatttggattaaaaacaaagactttcttaagagatgtaaaattttcatgatgttttcttttttgctaaaactaaagaattattcttttacatttcagtgtttctggatcatgaaaacgccaacaaaattctgaatcggccaaagaggtataattcaggcaaactggaagagtttgtgcaggggaacctggagagagaatgtatggaagaaaagtgtagttttgaagaagcacgagaagtgtttgaaaacactgaaagaacaactgaattttggaagcagtatgtggatggagatcagtgtgagtccaatccatgtctgaatggcggcagttgcaaggatgacattaattcctatgaatgttggtgtccctttggatttgaaggaaagaactgtgaactggatgtgacatgtaacattaagaatggcagatgcgagcagttttgtaaaaatagtgctgataacaaggtggtgtgctcctgtactgagggatatcgactggcagaaaaccagaagtcctgtgaaccagcagtgccatttccatgtggaagagtgtctgtgtcacagacttctaagctgacccgggctgagactgtgtttcctgatgtggactatgtgaattctactgaagctgaaaccattctggataacatcactcagagcacccagtcatttaatgacttcactcgggtggtgggcggagaagatgccaaaccaggccagttcccttggcaggtggtgctgaatggcaaagtggatgcattctgtggaggctctatcgtgaatgaaaaatggattgtgactgctgcccactgtgtggaaactggcgtgaaaattacagtggtcgcaggcgaacataatattgaggagacagaacatacagagcagaagcgaaatgtgattcgaattattcctcaccacaactacaatgcagctattaataagtacaaccatgacattgccctgctggaactggacgaacccctggtgctgaacagctacgtgacacctatttgcattgctgacaaggaatacaccaacatcttcctgaaatttggatctggctatgtgagtggctggggaagagtcttccacaaagggtactcagctctggtgctgcagtacctgagagtgccactggtggaccgagccacatgtctggagtctacaaagttccggatctataacaacatgttctgtgctggcttccatgaaggaggcagagattcatgtcagggagatagtgggggaccccatgtgactgaagtggaagggaccagtttcctgactggaattattagctggggcgaagagtgtgcaatgaaaggcaaatatggaatctataccaaggtgtcccggtatgtcaactggattaaggaaaaaacaaagctgact

SEQ ID NO: 540 - DNA, 2821 bp, Artificial Sequence
  hFIXss-Pro-mini Intron-Pro-human FIX R318Y/R338E/T343R optimized 0.8
atgcagcgcgtgaacatgatcatggcagaatcaccaggcctcatcaccatctgccttttaggatatctactcagtgctgaatgtacaggtttgtttccttttttaaaatacattgagtatgcttgccttttagatatagaaatatctgatgctgtcttcttcactaaattttgattacatgatttgacagcaatattgaagagtctaacagccagcacgcaggttggtaagtactggttctttgttagctaggttttcttcttcttcatttttaaaactaaatagatcgacaatgcttatgatgcatttatgtttaataaacactgttcagttcatgatttggtcatgtaattcctgttagaaaacattcatctccttggtttaaaaaaattaaaagtgggaaaacaaagaaatagcagaatatagtgaaaaaaaataaccacattatttttgtttggacttaccactttgaaatcaaaatgggaaacaaaagcacaaacaatggccttatttacacaaaaagtctgattttaagatatatgacatttcaaggtttcagaagtatgtaatgaggtgtgtctctaattttttaaattatatatcttcaatttaaagttttagttaaaacataaagattaacctttcattagcaagctgttagttatcaccaaagcttttcatggattaggaaaaaatcattttgtctctatgtcaaacatcttggagttgatatttggggaaacacaatactcagttgagttccctaggggagaaaagcaagcttaagaattgacataaagagtaggaagttagctaatgcaacatatatcactttgttttttcacaactacagtgactttatgtatttcccagaggaaggcatacagggaagaaattatcccatttggacaaacagcatgttctcacaggaagcatttatcacacttacttgtcaactttctagaatcaaatctagtagctgacagtaccaggatcaggggtgccaaccctaagcacccccagaaagctgactggccctgtggttcccactccagacatgatgtcagctgtgaaatcgacgtcgctggaccataattaggcttctgttcttcaggagacatttgttcaaagtcatttgggcaaccatattctgaaaacagcccagccagggtgatggatcactttgcaaagatcctcaatgagctattttcaagtgatgacaaagtgtgaagttaaccgctcatttgagaactttctttttcatccaaagtaaattcaaatatgattagaaatctgaccttttattactggaattctcttgactaaaagtaaaattgaattttaattcctaaatctccatgtgtatacagtactgtgggaacatcacagattttggctccatgccctaaagagaaattggctttcagattatttggattaaaaacaaagactttcttaagagatgtaaaattttcatgatgttttcttttttgctaaaactaaagaattattcttttacatttcagtgtttctggatcacgagaacgccaacaagatcctgaatcggccaaagaggtacaatagcggcaagctggaggagtttgtgcagggcaacctggagagagagtgtatggaggagaagtgtagctttgaggaggcccgggaggtgtttgagaacaccgagagaaccaccgagttttggaagcagtacgtggatggcgatcagtgtgagtccaatccatgtctgaatggcggcagctgcaaggatgacatcaattcctacgagtgttggtgtccctttggctttgagggcaagaactgtgagctggatgtgacctgtaacatcaagaatggcagatgcgagcagttttgtaagaatagcgccgataacaaggtggtgtgctcctgtaccgagggctaccggctggccgagaaccagaagtcctgtgagccagccgtgccatttccatgtggcagagtgagcgtgagccagaccagcaagctgacccgggccgagaccgtgtttcctgatgtggactacgtgaatagcaccgaggccgagaccatcctggataacatcacccagagcacccagagctttaatgacttcacccgggtggtgggcggcgaggatgccaagccaggccagttcccttggcaggtggtgctgaatggcaaggtggatgccttctgtggcggcagcatcgtgaatgagaagtggatcgtgaccgccgcccactgtgtggagaccggcgtgaagatcaccgtggtggccggcgagcacaatatcgaggagaccgagcacaccgagcagaagcggaatgtgatccggatcatccctcaccacaactacaatgccgccatcaataagtacaaccacgacatcgccctgctggagctggacgagcccctggtgctgaacagctacgtgacccctatctgcatcgccgacaaggagtacaccaacatcttcctgaagtttggcagcggctacgtgagcggctggggcagagtgttccacaagggctacagcgccctggtgctgcagtacctgagagtgccactggtggaccgggccacctgtctggagagcaccaagttccggatctacaacaacatgttctgtgccggcttccacgagggcggcagagatagctgtcagggcgatagcggcggcccccacgtgaccgaggtggagggcaccagcttcctgaccggcatcatcagctggggcgaggagtgtgccatgaagggcaagtacggcatctacaccaaggtgtcccggtacgtgaactggatcaaggagaagaccaagctgacc

SEQ ID NO: 541 - DNA, 2821 bp, Artificial Sequence
  hFIXss-Pro-mini Intron-Pro-human FIX R318Y/R338E/T343R optimized 1.0
atgcagcgcgtgaacatgatcatggcagaatcaccaggcctcatcaccatctgccttttaggatatctactcagtgctgaatgtacaggtttgtttccttttttaaaatacattgagtatgcttgccttttagatatagaaatatctgatgctgtcttcttcactaaattttgattacatgatttgacagcaatattgaagagtctaacagccagcacgcaggttggtaagtactggttctttgttagctaggttttcttcttcttcatttttaaaactaaatagatcgacaatgcttatgatgcatttatgtttaataaacactgttcagttcatgatttggtcatgtaattcctgttagaaaacattcatctccttggtttaaaaaaattaaaagtgggaaaacaaagaaatagcagaatatagtgaaaaaaaataaccacattatttttgtttggacttaccactttgaaatcaaaatgggaaacaaaagcacaaacaatggccttatttacacaaaaagtctgattttaagatatatgacatttcaaggtttcagaagtatgtaatgaggtgtgtctctaattttttaaattatatatcttcaatttaaagttttagttaaaacataaagattaacctttcattagcaagctgttagttatcaccaaagcttttcatggattaggaaaaaatcattttgtctctatgtcaaacatcttggagttgatatttggggaaacacaatactcagttgagttccctaggggagaaaagcaagcttaagaattgacataaagagtaggaagttagctaatgcaacatatatcactttgttttttcacaactacagtgactttatgtatttcccagaggaaggcatacagggaagaaattatcccatttggacaaacagcatgttctcacaggaagcatttatcacacttacttgtcaactttctagaatcaaatctagtagctgacagtaccaggatcaggggtgccaaccctaagcacccccagaaagctgactggccctgtggttcccactccagacatgatgtcagctgtgaaatcgacgtcgctggaccataattaggcttctgttcttcaggagacatttgttcaaagtcatttgggcaaccatattctgaaaacagcccagccagggtgatggatcactttgcaaagatcctcaatgagctattttcaagtgatgacaaagtgtgaagttaaccgctcatttgagaactttctttttcatccaaagtaaattcaaatatgattagaaatctgaccttttattactggaattctcttgactaaaagtaaaattgaattttaattcctaaatctccatgtgtatacagtactgtgggaacatcacagattttggctccatgccctaaagagaaattggctttcagattatttggattaaaaacaaagactttcttaagagatgtaaaattttcatgatgttttcttttttgctaaaactaaagaattattcttttacatttcagtgttcctggaccacgagaacgccaacaagatcctgaaccggcccaagcggtacaacagcggcaagctggaggagttcgtgcagggcaacctggagcgggagtgcatggaggagaagtgcagcttcgaggaggcccgggaggtgttcgagaacaccgagcggaccaccgagttctggaagcagtacgtggacggcgaccagtgcgagagcaacccctgcctgaacggcggcagctgcaaggacgacatcaacagctacgagtgctggtgccccttcggcttcgagggcaagaactgcgagctggacgtgacctgcaacatcaagaacggccggtgcgagcagttctgcaagaacagcgccgacaacaaggtggtgtgcagctgcaccgagggctaccggctggccgagaaccagaagagctgcgagcccgccgtgcccttcccctgcggccgggtgagcgtgagccagaccagcaagctgacccgggccgagaccgtgttccccgacgtggactacgtgaacagcaccgaggccgagaccatcctggacaacatcacccagagcacccagagcttcaacgacttcacccgggtggtgggcggcgaggacgccaagcccggccagttcccctggcaggtggtgctgaacggcaaggtggacgccttctgcggcggcagcatcgtgaacgagaagtggatcgtgaccgccgcccactgcgtggagaccggcgtgaagatcaccgtggtggccggcgagcacaacatcgaggagaccgagcacaccgagcagaagcggaacgtgatccggatcatcccccaccacaactacaacgccgccatcaacaagtacaaccacgacatcgccctgctggagctggacgagcccctggtgctgaacagctacgtgacccccatctgcatcgccgacaaggagtacaccaacatcttcctgaagttcggcagcggctacgtgagcggctggggccgggtgttccacaagggctacagcgccctggtgctgcagtacctgcgggtgcccctggtggaccgggccacctgcctggagagcaccaagttccggatctacaacaacatgttctgcgccggcttccacgagggcggccgggacagctgccagggcgacagcggcggcccccacgtgaccgaggtggagggcaccagcttcctgaccggcatcatcagctggggcgaggagtgcgccatgaagggcaagtacggcatctacaccaaggtgagccggtacgtgaactggatcaaggagaagaccaagctgacc

SEQ ID NO: 542 - DNA, 2821 bp, Artificial Sequence
  hFIXss-Pro-mini Intron-Pro-human FIX R338L optimized 0.5
atgcagcgcgtgaacatgatcatggcagaatcaccaggcctcatcaccatctgccttttaggatatctactcagtgctgaatgtacaggtttgtttccttttttaaaatacattgagtatgcttgccttttagatatagaaatatctgatgctgtcttcttcactaaattttgattacatgatttgacagcaatattgaagagtctaacagccagcacgcaggttggtaagtactggttctttgttagctaggttttcttcttcttcatttttaaaactaaatagatcgacaatgcttatgatgcatttatgtttaataaacactgttcagttcatgatttggtcatgtaattcctgttagaaaacattcatctccttggtttaaaaaaattaaaagtgggaaaacaaagaaatagcagaatatagtgaaaaaaaataaccacattatttttgtttggacttaccactttgaaatcaaaatgggaaacaaaagcacaaacaatggccttatttacacaaaaagtctgattttaagatatatgacatttcaaggtttcagaagtatgtaatgaggtgtgtctctaattttttaaattatatatcttcaatttaaagttttagttaaaacataaagattaacctttcattagcaagctgttagttatcaccaaagcttttcatggattaggaaaaaatcattttgtctctatgtcaaacatcttggagttgatatttggggaaacacaatactcagttgagttccctaggggagaaaagcaagcttaagaattgacataaagagtaggaagttagctaatgcaacatatatcactttgttttttcacaactacagtgactttatgtatttcccagaggaaggcatacagggaagaaattatcccatttggacaaacagcatgttctcacaggaagcatttatcacacttacttgtcaactttctagaatcaaatctagtagctgacagtaccaggatcaggggtgccaaccctaagcacccccagaaagctgactggccctgtggttcccactccagacatgatgtcagctgtgaaatcgacgtcgctggaccataattaggcttctgttcttcaggagacatttgttcaaagtcatttgggcaaccatattctgaaaacagcccagccagggtgatggatcactttgcaaagatcctcaatgagctattttcaagtgatgacaaagtgtgaagttaaccgctcatttgagaactttctttttcatccaaagtaaattcaaatatgattagaaatctgaccttttattactggaattctcttgactaaaagtaaaattgaattttaattcctaaatctccatgtgtatacagtactgtgggaacatcacagattttggctccatgccctaaagagaaattggctttcagattatttggattaaaaacaaagactttcttaagagatgtaaaattttcatgatgttttcttttttgctaaaactaaagaattattcttttacatttcagtgtttctggatcatgaaaacgccaacaaaattctgaatcggccaaagaggtataattcaggcaaactggaagagtttgtgcaggggaacctggagagagaatgtatggaagaaaagtgtagttttgaagaagcacgagaagtgtttgaaaacactgaaagaacaactgaattttggaagcagtatgtggatggagatcagtgtgagtccaatccatgtctgaatggcggcagttgcaaggatgacattaattcctatgaatgttggtgtccctttggatttgaaggaaagaactgtgaactggatgtgacatgtaacattaagaatggcagatgcgagcagttttgtaaaaatagtgctgataacaaggtggtgtgctcctgtactgagggatatcgactggcagaaaaccagaagtcctgtgaaccagcagtgccatttccatgtggaagagtgtctgtgtcacagacttctaagctgacccgggctgagactgtgtttcctgatgtggactatgtgaattctactgaagctgaaaccattctggataacatcactcagagcacccagtcatttaatgacttcactcgggtggtgggcggagaagatgccaaaccaggccagttcccttggcaggtggtgctgaatggcaaagtggatgcattctgtggaggctctatcgtgaatgaaaaatggattgtgactgctgcccactgtgtggaaactggcgtgaaaattacagtggtcgcaggcgaacataatattgaggagacagaacatacagagcagaagcgaaatgtgattcgaattattcctcaccacaactacaatgcagctattaataagtacaaccatgacattgccctgctggaactggacgaacccctggtgctgaacagctacgtgacacctatttgcattgctgacaaggaatacaccaacatcttcctgaaatttggatctggctatgtgagtggctggggaagagtcttccacaaagggagatcagctctggtgctgcagtacctgagagtgccactggtggaccgagccacatgtctgctgtctacaaagttcaccatctataacaacatgttctgtgctggcttccatgaaggaggcagagattcatgtcagggagatagtgggggaccccatgtgactgaagtggaagggaccagtttcctgactggaattattagctggggcgaagagtgtgcaatgaaaggcaaatatggaatctataccaaggtgtcccggtatgtcaactggattaaggaaaaaacaaagctgact

SEQ ID NO: 543 - DNA, 2821 bp, Artificial Sequence
  hFIXss-Pro-mini Intron-Pro-human FIX R338L optimized 0.8
atgcagcgcgtgaacatgatcatggcagaatcaccaggcctcatcaccatctgccttttaggatatctactcagtgctgaatgtacaggtttgtttccttttttaaaatacattgagtatgcttgccttttagatatagaaatatctgatgctgtcttcttcactaaattttgattacatgatttgacagcaatattgaagagtctaacagccagcacgcaggttggtaagtactggttctttgttagctaggttttcttcttcttcatttttaaaactaaatagatcgacaatgcttatgatgcatttatgtttaataaacactgttcagttcatgatttggtcatgtaattcctgttagaaaacattcatctccttggtttaaaaaaattaaaagtgggaaaacaaagaaatagcagaatatagtgaaaaaaaataaccacattatttttgtttggacttaccactttgaaatcaaaatgggaaacaaaagcacaaacaatggccttatttacacaaaaagtctgattttaagatatatgacatttcaaggtttcagaagtatgtaatgaggtgtgtctctaattttttaaattatatatcttcaatttaaagttttagttaaaacataaagattaacctttcattagcaagctgttagttatcaccaaagcttttcatggattaggaaaaaatcattttgtctctatgtcaaacatcttggagttgatatttggggaaacacaatactcagttgagttccctaggggagaaaagcaagcttaagaattgacataaagagtaggaagttagctaatgcaacatatatcactttgttttttcacaactacagtgactttatgtatttcccagaggaaggcatacagggaagaaattatcccatttggacaaacagcatgttctcacaggaagcatttatcacacttacttgtcaactttctagaatcaaatctagtagctgacagtaccaggatcaggggtgccaaccctaagcacccccagaaagctgactggccctgtggttcccactccagacatgatgtcagctgtgaaatcgacgtcgctggaccataattaggcttctgttcttcaggagacatttgttcaaagtcatttgggcaaccatattctgaaaacagcccagccagggtgatggatcactttgcaaagatcctcaatgagctattttcaagtgatgacaaagtgtgaagttaaccgctcatttgagaactttctttttcatccaaagtaaattcaaatatgattagaaatctgaccttttattactggaattctcttgactaaaagtaaaattgaattttaattcctaaatctccatgtgtatacagtactgtgggaacatcacagattttggctccatgccctaaagagaaattggctttcagattatttggattaaaaacaaagactttcttaagagatgtaaaattttcatgatgttttcttttttgctaaaactaaagaattattcttttacatttcagtgtttctggatcacgagaacgccaacaagatcctgaatcggccaaagaggtacaatagcggcaagctggaggagtttgtgcagggcaacctggagagagagtgtatggaggagaagtgtagctttgaggaggcccgggaggtgtttgagaacaccgagagaaccaccgagttttggaagcagtacgtggatggcgatcagtgtgagtccaatccatgtctgaatggcggcagctgcaaggatgacatcaattcctacgagtgttggtgtccctttggctttgagggcaagaactgtgagctggatgtgacctgtaacatcaagaatggcagatgcgagcagttttgtaagaatagcgccgataacaaggtggtgtgctcctgtaccgagggctaccggctggccgagaaccagaagtcctgtgagccagccgtgccatttccatgtggcagagtgagcgtgagccagaccagcaagctgacccgggccgagaccgtgtttcctgatgtggactacgtgaatagcaccgaggccgagaccatcctggataacatcacccagagcacccagagctttaatgacttcacccgggtggtgggcggcgaggatgccaagccaggccagttcccttggcaggtggtgctgaatggcaaggtggatgccttctgtggcggcagcatcgtgaatgagaagtggatcgtgaccgccgcccactgtgtggagaccggcgtgaagatcaccgtggtggccggcgagcacaatatcgaggagaccgagcacaccgagcagaagcggaatgtgatccggatcatccctcaccacaactacaatgccgccatcaataagtacaaccacgacatcgccctgctggagctggacgagcccctggtgctgaacagctacgtgacccctatctgcatcgccgacaaggagtacaccaacatcttcctgaagtttggcagcggctacgtgagcggctggggcagagtgttccacaagggcagaagcgccctggtgctgcagtacctgagagtgccactggtggaccgggccacctgtctgctgagcaccaagttcaccatctacaacaacatgttctgtgccggcttccacgagggcggcagagatagctgtcagggcgatagcggcggcccccacgtgaccgaggtggagggcaccagcttcctgaccggcatcatcagctggggcgaggagtgtgccatgaagggcaagtacggcatctacaccaaggtgtcccggtacgtgaactggatcaaggagaagaccaagctgacc

SEQ ID NO: 544 - DNA, 2821 bp, Artificial Sequence
  hFIXss-Pro-mini Intron-Pro-human FIX R338L optimized 1.0
atgcagcgcgtgaacatgatcatggcagaatcaccaggcctcatcaccatctgccttttaggatatctactcagtgctgaatgtacaggtttgtttccttttttaaaatacattgagtatgcttgccttttagatatagaaatatctgatgctgtcttcttcactaaattttgattacatgatttgacagcaatattgaagagtctaacagccagcacgcaggttggtaagtactggttctttgttagctaggttttcttcttcttcatttttaaaactaaatagatcgacaatgcttatgatgcatttatgtttaataaacactgttcagttcatgatttggtcatgtaattcctgttagaaaacattcatctccttggtttaaaaaaattaaaagtgggaaaacaaagaaatagcagaatatagtgaaaaaaaataaccacattatttttgtttggacttaccactttgaaatcaaaatgggaaacaaaagcacaaacaatggccttatttacacaaaaagtctgattttaagatatatgacatttcaaggtttcagaagtatgtaatgaggtgtgtctctaattttttaaattatatatcttcaatttaaagttttagttaaaacataaagattaacctttcattagcaagctgttagttatcaccaaagcttttcatggattaggaaaaaatcattttgtctctatgtcaaacatcttggagttgatatttggggaaacacaatactcagttgagttccctaggggagaaaagcaagcttaagaattgacataaagagtaggaagttagctaatgcaacatatatcactttgttttttcacaactacagtgactttatgtatttcccagaggaaggcatacagggaagaaattatcccatttggacaaacagcatgttctcacaggaagcatttatcacacttacttgtcaactttctagaatcaaatctagtagctgacagtaccaggatcaggggtgccaaccctaagcacccccagaaagctgactggccctgtggttcccactccagacatgatgtcagctgtgaaatcgacgtcgctggaccataattaggcttctgttcttcaggagacatttgttcaaagtcatttgggcaaccatattctgaaaacagcccagccagggtgatggatcactttgcaaagatcctcaatgagctattttcaagtgatgacaaagtgtgaagttaaccgctcatttgagaactttctttttcatccaaagtaaattcaaatatgattagaaatctgaccttttattactggaattctcttgactaaaagtaaaattgaattttaattcctaaatctccatgtgtatacagtactgtgggaacatcacagattttggctccatgccctaaagagaaattggctttcagattatttggattaaaaacaaagactttcttaagagatgtaaaattttcatgatgttttcttttttgctaaaactaaagaattattcttttacatttcagtgttcctggaccacgagaacgccaacaagatcctgaaccggcccaagcggtacaacagcggcaagctggaggagttcgtgcagggcaacctggagcgggagtgcatggaggagaagtgcagcttcgaggaggcccgggaggtgttcgagaacaccgagcggaccaccgagttctggaagcagtacgtggacggcgaccagtgcgagagcaacccctgcctgaacggcggcagctgcaaggacgacatcaacagctacgagtgctggtgccccttcggcttcgagggcaagaactgcgagctggacgtgacctgcaacatcaagaacggccggtgcgagcagttctgcaagaacagcgccgacaacaaggtggtgtgcagctgcaccgagggctaccggctggccgagaaccagaagagctgcgagcccgccgtgcccttcccctgcggccgggtgagcgtgagccagaccagcaagctgacccgggccgagaccgtgttccccgacgtggactacgtgaacagcaccgaggccgagaccatcctggacaacatcacccagagcacccagagcttcaacgacttcacccgggtggtgggcggcgaggacgccaagcccggccagttcccctggcaggtggtgctgaacggcaaggtggacgccttctgcggcggcagcatcgtgaacgagaagtggatcgtgaccgccgcccactgcgtggagaccggcgtgaagatcaccgtggtggccggcgagcacaacatcgaggagaccgagcacaccgagcagaagcggaacgtgatccggatcatcccccaccacaactacaacgccgccatcaacaagtacaaccacgacatcgccctgctggagctggacgagcccctggtgctgaacagctacgtgacccccatctgcatcgccgacaaggagtacaccaacatcttcctgaagttcggcagcggctacgtgagcggctggggccgggtgttccacaagggccggagcgccctggtgctgcagtacctgcgggtgcccctggtggaccgggccacctgcctgctgagcaccaagttcaccatctacaacaacatgttctgcgccggcttccacgagggcggccgggacagctgccagggcgacagcggcggcccccacgtgaccgaggtggagggcaccagcttcctgaccggcatcatcagctggggcgaggagtgcgccatgaagggcaagtacggcatctacaccaaggtgagccggtacgtgaactggatcaaggagaagaccaagctgacc

SEQ ID NO: 545 - DNA, 2821 bp, Artificial Sequence
  mouse optimized hFIXss-Pro-mini Intron-Pro-human wild type FIX optimized 0.5
atgcagcgcgtgaacatgattatggccgagagccctggcctgatcaccatctgcctgctgggctacctgctgagcgccgagtgtacaggtttgtttccttttttaaaatacattgagtatgcttgccttttagatatagaaatatctgatgctgtcttcttcactaaattttgattacatgatttgacagcaatattgaagagtctaacagccagcacgcaggttggtaagtactggttctttgttagctaggttttcttcttcttcatttttaaaactaaatagatcgacaatgcttatgatgcatttatgtttaataaacactgttcagttcatgatttggtcatgtaattcctgttagaaaacattcatctccttggtttaaaaaaattaaaagtgggaaaacaaagaaatagcagaatatagtgaaaaaaaataaccacattatttttgtttggacttaccactttgaaatcaaaatgggaaacaaaagcacaaacaatggccttatttacacaaaaagtctgattttaagatatatgacatttcaaggtttcagaagtatgtaatgaggtgtgtctctaattttttaaattatatatcttcaatttaaagttttagttaaaacataaagattaacctttcattagcaagctgttagttatcaccaaagcttttcatggattaggaaaaaatcattttgtctctatgtcaaacatcttggagttgatatttggggaaacacaatactcagttgagttccctaggggagaaaagcaagcttaagaattgacataaagagtaggaagttagctaatgcaacatatatcactttgttttttcacaactacagtgactttatgtatttcccagaggaaggcatacagggaagaaattatcccatttggacaaacagcatgttctcacaggaagcatttatcacacttacttgtcaactttctagaatcaaatctagtagctgacagtaccaggatcaggggtgccaaccctaagcacccccagaaagctgactggccctgtggttcccactccagacatgatgtcagctgtgaaatcgacgtcgctggaccataattaggcttctgttcttcaggagacatttgttcaaagtcatttgggcaaccatattctgaaaacagcccagccagggtgatggatcactttgcaaagatcctcaatgagctattttcaagtgatgacaaagtgtgaagttaaccgctcatttgagaactttctttttcatccaaagtaaattcaaatatgattagaaatctgaccttttattactggaattctcttgactaaaagtaaaattgaattttaattcctaaatctccatgtgtatacagtactgtgggaacatcacagattttggctccatgccctaaagagaaattggctttcagattatttggattaaaaacaaagactttcttaagagatgtaaaattttcatgatgttttcttttttgctaaaactaaagaattattcttttacatttcagtgtttctggatcatgaaaacgccaacaaaattctgaatcggccaaagaggtataattcaggcaaactggaagagtttgtgcaggggaacctggagagagaatgtatggaagaaaagtgtagttttgaagaagcacgagaagtgtttgaaaacactgaaagaacaactgaattttggaagcagtatgtggatggagatcagtgtgagtccaatccatgtctgaatggcggcagttgcaaggatgacattaattcctatgaatgttggtgtccctttggatttgaaggaaagaactgtgaactggatgtgacatgtaacattaagaatggcagatgcgagcagttttgtaaaaatagtgctgataacaaggtggtgtgctcctgtactgagggatatcgactggcagaaaaccagaagtcctgtgaaccagcagtgccatttccatgtggaagagtgtctgtgtcacagacttctaagctgacccgggctgagactgtgtttcctgatgtggactatgtgaattctactgaagctgaaaccattctggataacatcactcagagcacccagtcatttaatgacttcactcgggtggtgggcggagaagatgccaaaccaggccagttcccttggcaggtggtgctgaatggcaaagtggatgcattctgtggaggctctatcgtgaatgaaaaatggattgtgactgctgcccactgtgtggaaactggcgtgaaaattacagtggtcgcaggcgaacataatattgaggagacagaacatacagagcagaagcgaaatgtgattcgaattattcctcaccacaactacaatgcagctattaataagtacaaccatgacattgccctgctggaactggacgaacccctggtgctgaacagctacgtgacacctatttgcattgctgacaaggaatacaccaacatcttcctgaaatttggatctggctatgtgagtggctggggaagagtcttccacaaagggagatcagctctggtgctgcagtacctgagagtgccactggtggaccgagccacatgtctgcgatctacaaagttcaccatctataacaacatgttctgtgctggcttccatgaaggaggcagagattcatgtcagggagatagtgggggaccccatgtgactgaagtggaagggaccagtttcctgactggaattattagctggggcgaagagtgtgcaatgaaaggcaaatatggaatctataccaaggtgtcccggtatgtcaactggattaaggaaaaaacaaagctgact

SEQ ID NO: 546 - DNA, 2821 bp, Artificial Sequence
  mouse optimized hFIXss-Pro-mini Intron-Pro-human wild type FIX optimized 0.8
atgcagcgcgtgaacatgattatggccgagagccctggcctgatcaccatctgcctgctgggctacctgctgagcgccgagtgtacaggtttgtttccttttttaaaatacattgagtatgcttgccttttagatatagaaatatctgatgctgtcttcttcactaaattttgattacatgatttgacagcaatattgaagagtctaacagccagcacgcaggttggtaagtactggttctttgttagctaggttttcttcttcttcatttttaaaactaaatagatcgacaatgcttatgatgcatttatgtttaataaacactgttcagttcatgatttggtcatgtaattcctgttagaaaacattcatctccttggtttaaaaaaattaaaagtgggaaaacaaagaaatagcagaatatagtgaaaaaaaataaccacattatttttgtttggacttaccactttgaaatcaaaatgggaaacaaaagcacaaacaatggccttatttacacaaaaagtctgattttaagatatatgacatttcaaggtttcagaagtatgtaatgaggtgtgtctctaattttttaaattatatatcttcaatttaaagttttagttaaaacataaagattaacctttcattagcaagctgttagttatcaccaaagcttttcatggattaggaaaaaatcattttgtctctatgtcaaacatcttggagttgatatttggggaaacacaatactcagttgagttccctaggggagaaaagcaagcttaagaattgacataaagagtaggaagttagctaatgcaacatatatcactttgttttttcacaactacagtgactttatgtatttcccagaggaaggcatacagggaagaaattatcccatttggacaaacagcatgttctcacaggaagcatttatcacacttacttgtcaactttctagaatcaaatctagtagctgacagtaccaggatcaggggtgccaaccctaagcacccccagaaagctgactggccctgtggttcccactccagacatgatgtcagctgtgaaatcgacgtcgctggaccataattaggcttctgttcttcaggagacatttgttcaaagtcatttgggcaaccatattctgaaaacagcccagccagggtgatggatcactttgcaaagatcctcaatgagctattttcaagtgatgacaaagtgtgaagttaaccgctcatttgagaactttctttttcatccaaagtaaattcaaatatgattagaaatctgaccttttattactggaattctcttgactaaaagtaaaattgaattttaattcctaaatctccatgtgtatacagtactgtgggaacatcacagattttggctccatgccctaaagagaaattggctttcagattatttggattaaaaacaaagactttcttaagagatgtaaaattttcatgatgttttcttttttgctaaaactaaagaattattcttttacatttcagtgtttctggatcacgagaacgccaacaagatcctgaatcggccaaagaggtacaatagcggcaagctggaggagtttgtgcagggcaacctggagagagagtgtatggaggagaagtgtagctttgaggaggcccgggaggtgtttgagaacaccgagagaaccaccgagttttggaagcagtacgtggatggcgatcagtgtgagtccaatccatgtctgaatggcggcagctgcaaggatgacatcaattcctacgagtgttggtgtccctttggctttgagggcaagaactgtgagctggatgtgacctgtaacatcaagaatggcagatgcgagcagttttgtaagaatagcgccgataacaaggtggtgtgctcctgtaccgagggctaccggctggccgagaaccagaagtcctgtgagccagccgtgccatttccatgtggcagagtgagcgtgagccagaccagcaagctgacccgggccgagaccgtgtttcctgatgtggactacgtgaatagcaccgaggccgagaccatcctggataacatcacccagagcacccagagctttaatgacttcacccgggtggtgggcggcgaggatgccaagccaggccagttcccttggcaggtggtgctgaatggcaaggtggatgccttctgtggcggcagcatcgtgaatgagaagtggatcgtgaccgccgcccactgtgtggagaccggcgtgaagatcaccgtggtggccggcgagcacaatatcgaggagaccgagcacaccgagcagaagcggaatgtgatccggatcatccctcaccacaactacaatgccgccatcaataagtacaaccacgacatcgccctgctggagctggacgagcccctggtgctgaacagctacgtgacccctatctgcatcgccgacaaggagtacaccaacatcttcctgaagtttggcagcggctacgtgagcggctggggcagagtgttccacaagggcagaagcgccctggtgctgcagtacctgagagtgccactggtggaccgggccacctgtctgcggagcaccaagttcaccatctacaacaacatgttctgtgccggcttccacgagggcggcagagatagctgtcagggcgatagcggcggcccccacgtgaccgaggtggagggcaccagcttcctgaccggcatcatcagctggggcgaggagtgtgccatgaagggcaagtacggcatctacaccaaggtgtcccggtacgtgaactggatcaaggagaagaccaagctgacc

SEQ ID NO: 547 - DNA, 2821 bp, Artificial Sequence
  mouse optimized hFIXss-Pro-mini Intron-Pro-human wild type FIX optimized 1.0
atgcagcgcgtgaacatgattatggccgagagccctggcctgatcaccatctgcctgctgggctacctgctgagcgccgagtgtacaggtttgtttccttttttaaaatacattgagtatgcttgccttttagatatagaaatatctgatgctgtcttcttcactaaattttgattacatgatttgacagcaatattgaagagtctaacagccagcacgcaggttggtaagtactggttctttgttagctaggttttcttcttcttcatttttaaaactaaatagatcgacaatgcttatgatgcatttatgtttaataaacactgttcagttcatgatttggtcatgtaattcctgttagaaaacattcatctccttggtttaaaaaaattaaaagtgggaaaacaaagaaatagcagaatatagtgaaaaaaaataaccacattatttttgtttggacttaccactttgaaatcaaaatgggaaacaaaagcacaaacaatggccttatttacacaaaaagtctgattttaagatatatgacatttcaaggtttcagaagtatgtaatgaggtgtgtctctaattttttaaattatatatcttcaatttaaagttttagttaaaacataaagattaacctttcattagcaagctgttagttatcaccaaagcttttcatggattaggaaaaaatcattttgtctctatgtcaaacatcttggagttgatatttggggaaacacaatactcagttgagttccctaggggagaaaagcaagcttaagaattgacataaagagtaggaagttagctaatgcaacatatatcactttgttttttcacaactacagtgactttatgtatttcccagaggaaggcatacagggaagaaattatcccatttggacaaacagcatgttctcacaggaagcatttatcacacttacttgtcaactttctagaatcaaatctagtagctgacagtaccaggatcaggggtgccaaccctaagcacccccagaaagctgactggccctgtggttcccactccagacatgatgtcagctgtgaaatcgacgtcgctggaccataattaggcttctgttcttcaggagacatttgttcaaagtcatttgggcaaccatattctgaaaacagcccagccagggtgatggatcactttgcaaagatcctcaatgagctattttcaagtgatgacaaagtgtgaagttaaccgctcatttgagaactttctttttcatccaaagtaaattcaaatatgattagaaatctgaccttttattactggaattctcttgactaaaagtaaaattgaattttaattcctaaatctccatgtgtatacagtactgtgggaacatcacagattttggctccatgccctaaagagaaattggctttcagattatttggattaaaaacaaagactttcttaagagatgtaaaattttcatgatgttttcttttttgctaaaactaaagaattattcttttacatttcagtgttcctggaccacgagaacgccaacaagatcctgaaccggcccaagcggtacaacagcggcaagctggaggagttcgtgcagggcaacctggagcgggagtgcatggaggagaagtgcagcttcgaggaggcccgggaggtgttcgagaacaccgagcggaccaccgagttctggaagcagtacgtggacggcgaccagtgcgagagcaacccctgcctgaacggcggcagctgcaaggacgacatcaacagctacgagtgctggtgccccttcggcttcgagggcaagaactgcgagctggacgtgacctgcaacatcaagaacggccggtgcgagcagttctgcaagaacagcgccgacaacaaggtggtgtgcagctgcaccgagggctaccggctggccgagaaccagaagagctgcgagcccgccgtgcccttcccctgcggccgggtgagcgtgagccagaccagcaagctgacccgggccgagaccgtgttccccgacgtggactacgtgaacagcaccgaggccgagaccatcctggacaacatcacccagagcacccagagcttcaacgacttcacccgggtggtgggcggcgaggacgccaagcccggccagttcccctggcaggtggtgctgaacggcaaggtggacgccttctgcggcggcagcatcgtgaacgagaagtggatcgtgaccgccgcccactgcgtggagaccggcgtgaagatcaccgtggtggccggcgagcacaacatcgaggagaccgagcacaccgagcagaagcggaacgtgatccggatcatcccccaccacaactacaacgccgccatcaacaagtacaaccacgacatcgccctgctggagctggacgagcccctggtgctgaacagctacgtgacccccatctgcatcgccgacaaggagtacaccaacatcttcctgaagttcggcagcggctacgtgagcggctggggccgggtgttccacaagggccggagcgccctggtgctgcagtacctgcgggtgcccctggtggaccgggccacctgcctgcggagcaccaagttcaccatctacaacaacatgttctgcgccggcttccacgagggcggccgggacagctgccagggcgacagcggcggcccccacgtgaccgaggtggagggcaccagcttcctgaccggcatcatcagctggggcgaggagtgcgccatgaagggcaagtacggcatctacaccaaggtgagccggtacgtgaactggatcaaggagaagaccaagctgacc

SEQ ID NO: 548 - DNA, 2821 bp, Artificial Sequence
  mouse optimized hFIXss-Pro-mini Intron-Pro-human FIX R318Y/R338E/T343R optimized 0.5
atgcagcgcgtgaacatgattatggccgagagccctggcctgatcaccatctgcctgctgggctacctgctgagcgccgagtgtacaggtttgtttccttttttaaaatacattgagtatgcttgccttttagatatagaaatatctgatgctgtcttcttcactaaattttgattacatgatttgacagcaatattgaagagtctaacagccagcacgcaggttggtaagtactggttctttgttagctaggttttcttcttcttcatttttaaaactaaatagatcgacaatgcttatgatgcatttatgtttaataaacactgttcagttcatgatttggtcatgtaattcctgttagaaaacattcatctccttggtttaaaaaaattaaaagtgggaaaacaaagaaatagcagaatatagtgaaaaaaaataaccacattatttttgtttggacttaccactttgaaatcaaaatgggaaacaaaagcacaaacaatggccttatttacacaaaaagtctgattttaagatatatgacatttcaaggtttcagaagtatgtaatgaggtgtgtctctaattttttaaattatatatcttcaatttaaagttttagttaaaacataaagattaacctttcattagcaagctgttagttatcaccaaagcttttcatggattaggaaaaaatcattttgtctctatgtcaaacatcttggagttgatatttggggaaacacaatactcagttgagttccctaggggagaaaagcaagcttaagaattgacataaagagtaggaagttagctaatgcaacatatatcactttgttttttcacaactacagtgactttatgtatttcccagaggaaggcatacagggaagaaattatcccatttggacaaacagcatgttctcacaggaagcatttatcacacttacttgtcaactttctagaatcaaatctagtagctgacagtaccaggatcaggggtgccaaccctaagcacccccagaaagctgactggccctgtggttcccactccagacatgatgtcagctgtgaaatcgacgtcgctggaccataattaggcttctgttcttcaggagacatttgttcaaagtcatttgggcaaccatattctgaaaacagcccagccagggtgatggatcactttgcaaagatcctcaatgagctattttcaagtgatgacaaagtgtgaagttaaccgctcatttgagaactttctttttcatccaaagtaaattcaaatatgattagaaatctgaccttttattactggaattctcttgactaaaagtaaaattgaattttaattcctaaatctccatgtgtatacagtactgtgggaacatcacagattttggctccatgccctaaagagaaattggctttcagattatttggattaaaaacaaagactttcttaagagatgtaaaattttcatgatgttttcttttttgctaaaactaaagaattattcttttacatttcagtgtttctggatcatgaaaacgccaacaaaattctgaatcggccaaagaggtataattcaggcaaactggaagagtttgtgcaggggaacctggagagagaatgtatggaagaaaagtgtagttttgaagaagcacgagaagtgtttgaaaacactgaaagaacaactgaattttggaagcagtatgtggatggagatcagtgtgagtccaatccatgtctgaatggcggcagttgcaaggatgacattaattcctatgaatgttggtgtccctttggatttgaaggaaagaactgtgaactggatgtgacatgtaacattaagaatggcagatgcgagcagttttgtaaaaatagtgctgataacaaggtggtgtgctcctgtactgagggatatcgactggcagaaaaccagaagtcctgtgaaccagcagtgccatttccatgtggaagagtgtctgtgtcacagacttctaagctgacccgggctgagactgtgtttcctgatgtggactatgtgaattctactgaagctgaaaccattctggataacatcactcagagcacccagtcatttaatgacttcactcgggtggtgggcggagaagatgccaaaccaggccagttcccttggcaggtggtgctgaatggcaaagtggatgcattctgtggaggctctatcgtgaatgaaaaatggattgtgactgctgcccactgtgtggaaactggcgtgaaaattacagtggtcgcaggcgaacataatattgaggagacagaacatacagagcagaagcgaaatgtgattcgaattattcctcaccacaactacaatgcagctattaataagtacaaccatgacattgccctgctggaactggacgaacccctggtgctgaacagctacgtgacacctatttgcattgctgacaaggaatacaccaacatcttcctgaaatttggatctggctatgtgagtggctggggaagagtcttccacaaagggtactcagctctggtgctgcagtacctgagagtgccactggtggaccgagccacatgtctggagtctacaaagttccggatctataacaacatgttctgtgctggcttccatgaaggaggcagagattcatgtcagggagatagtgggggaccccatgtgactgaagtggaagggaccagtttcctgactggaattattagctggggcgaagagtgtgcaatgaaaggcaaatatggaatctataccaaggtgtcccggtatgtcaactggattaaggaaaaaacaaagctgact

SEQ ID NO: 549 - DNA, 2821 bp, Artificial Sequence
  mouse optimized hFIXss-Pro-mini Intron-Pro-human FIX R318Y/R338E/T343R optimized 0.8
atgcagcgcgtgaacatgattatggccgagagccctggcctgatcaccatctgcctgctgggctacctgctgagcgccgagtgtacaggtttgtttccttttttaaaatacattgagtatgcttgccttttagatatagaaatatctgatgctgtcttcttcactaaattttgattacatgatttgacagcaatattgaagagtctaacagccagcacgcaggttggtaagtactggttctttgttagctaggttttcttcttcttcatttttaaaactaaatagatcgacaatgcttatgatgcatttatgtttaataaacactgttcagttcatgatttggtcatgtaattcctgttagaaaacattcatctccttggtttaaaaaaattaaaagtgggaaaacaaagaaatagcagaatatagtgaaaaaaaataaccacattatttttgtttggacttaccactttgaaatcaaaatgggaaacaaaagcacaaacaatggccttatttacacaaaaagtctgattttaagatatatgacatttcaaggtttcagaagtatgtaatgaggtgtgtctctaattttttaaattatatatcttcaatttaaagttttagttaaaacataaagattaacctttcattagcaagctgttagttatcaccaaagcttttcatggattaggaaaaaatcattttgtctctatgtcaaacatcttggagttgatatttggggaaacacaatactcagttgagttccctaggggagaaaagcaagcttaagaattgacataaagagtaggaagttagctaatgcaacatatatcactttgttttttcacaactacagtgactttatgtatttcccagaggaaggcatacagggaagaaattatcccatttggacaaacagcatgttctcacaggaagcatttatcacacttacttgtcaactttctagaatcaaatctagtagctgacagtaccaggatcaggggtgccaaccctaagcacccccagaaagctgactggccctgtggttcccactccagacatgatgtcagctgtgaaatcgacgtcgctggaccataattaggcttctgttcttcaggagacatttgttcaaagtcatttgggcaaccatattctgaaaacagcccagccagggtgatggatcactttgcaaagatcctcaatgagctattttcaagtgatgacaaagtgtgaagttaaccgctcatttgagaactttctttttcatccaaagtaaattcaaatatgattagaaatctgaccttttattactggaattctcttgactaaaagtaaaattgaattttaattcctaaatctccatgtgtatacagtactgtgggaacatcacagattttggctccatgccctaaagagaaattggctttcagattatttggattaaaaacaaagactttcttaagagatgtaaaattttcatgatgttttcttttttgctaaaactaaagaattattcttttacatttcagtgtttctggatcacgagaacgccaacaagatcctgaatcggccaaagaggtacaatagcggcaagctggaggagtttgtgcagggcaacctggagagagagtgtatggaggagaagtgtagctttgaggaggcccgggaggtgtttgagaacaccgagagaaccaccgagttttggaagcagtacgtggatggcgatcagtgtgagtccaatccatgtctgaatggcggcagctgcaaggatgacatcaattcctacgagtgttggtgtccctttggctttgagggcaagaactgtgagctggatgtgacctgtaacatcaagaatggcagatgcgagcagttttgtaagaatagcgccgataacaaggtggtgtgctcctgtaccgagggctaccggctggccgagaaccagaagtcctgtgagccagccgtgccatttccatgtggcagagtgagcgtgagccagaccagcaagctgacccgggccgagaccgtgtttcctgatgtggactacgtgaatagcaccgaggccgagaccatcctggataacatcacccagagcacccagagctttaatgacttcacccgggtggtgggcggcgaggatgccaagccaggccagttcccttggcaggtggtgctgaatggcaaggtggatgccttctgtggcggcagcatcgtgaatgagaagtggatcgtgaccgccgcccactgtgtggagaccggcgtgaagatcaccgtggtggccggcgagcacaatatcgaggagaccgagcacaccgagcagaagcggaatgtgatccggatcatccctcaccacaactacaatgccgccatcaataagtacaaccacgacatcgccctgctggagctggacgagcccctggtgctgaacagctacgtgacccctatctgcatcgccgacaaggagtacaccaacatcttcctgaagtttggcagcggctacgtgagcggctggggcagagtgttccacaagggctacagcgccctggtgctgcagtacctgagagtgccactggtggaccgggccacctgtctggagagcaccaagttccggatctacaacaacatgttctgtgccggcttccacgagggcggcagagatagctgtcagggcgatagcggcggcccccacgtgaccgaggtggagggcaccagcttcctgaccggcatcatcagctggggcgaggagtgtgccatgaagggcaagtacggcatctacaccaaggtgtcccggtacgtgaactggatcaaggagaagaccaagctgacc

SEQ ID NO: 550 - DNA, 2821 bp, Artificial Sequence
  mouse optimized hFIXss-Pro-mini Intron-Pro-human FIX R318Y/R338E/T343R optimized 1.0
atgcagcgcgtgaacatgattatggccgagagccctggcctgatcaccatctgcctgctgggctacctgctgagcgccgagtgtacaggtttgtttccttttttaaaatacattgagtatgcttgccttttagatatagaaatatctgatgctgtcttcttcactaaattttgattacatgatttgacagcaatattgaagagtctaacagccagcacgcaggttggtaagtactggttctttgttagctaggttttcttcttcttcatttttaaaactaaatagatcgacaatgcttatgatgcatttatgtttaataaacactgttcagttcatgatttggtcatgtaattcctgttagaaaacattcatctccttggtttaaaaaaattaaaagtgggaaaacaaagaaatagcagaatatagtgaaaaaaaataaccacattatttttgtttggacttaccactttgaaatcaaaatgggaaacaaaagcacaaacaatggccttatttacacaaaaagtctgattttaagatatatgacatttcaaggtttcagaagtatgtaatgaggtgtgtctctaattttttaaattatatatcttcaatttaaagttttagttaaaacataaagattaacctttcattagcaagctgttagttatcaccaaagcttttcatggattaggaaaaaatcattttgtctctatgtcaaacatcttggagttgatatttggggaaacacaatactcagttgagttccctaggggagaaaagcaagcttaagaattgacataaagagtaggaagttagctaatgcaacatatatcactttgttttttcacaactacagtgactttatgtatttcccagaggaaggcatacagggaagaaattatcccatttggacaaacagcatgttctcacaggaagcatttatcacacttacttgtcaactttctagaatcaaatctagtagctgacagtaccaggatcaggggtgccaaccctaagcacccccagaaagctgactggccctgtggttcccactccagacatgatgtcagctgtgaaatcgacgtcgctggaccataattaggcttctgttcttcaggagacatttgttcaaagtcatttgggcaaccatattctgaaaacagcccagccagggtgatggatcactttgcaaagatcctcaatgagctattttcaagtgatgacaaagtgtgaagttaaccgctcatttgagaactttctttttcatccaaagtaaattcaaatatgattagaaatctgaccttttattactggaattctcttgactaaaagtaaaattgaattttaattcctaaatctccatgtgtatacagtactgtgggaacatcacagattttggctccatgccctaaagagaaattggctttcagattatttggattaaaaacaaagactttcttaagagatgtaaaattttcatgatgttttcttttttgctaaaactaaagaattattcttttacatttcagtgttcctggaccacgagaacgccaacaagatcctgaaccggcccaagcggtacaacagcggcaagctggaggagttcgtgcagggcaacctggagcgggagtgcatggaggagaagtgcagcttcgaggaggcccgggaggtgttcgagaacaccgagcggaccaccgagttctggaagcagtacgtggacggcgaccagtgcgagagcaacccctgcctgaacggcggcagctgcaaggacgacatcaacagctacgagtgctggtgccccttcggcttcgagggcaagaactgcgagctggacgtgacctgcaacatcaagaacggccggtgcgagcagttctgcaagaacagcgccgacaacaaggtggtgtgcagctgcaccgagggctaccggctggccgagaaccagaagagctgcgagcccgccgtgcccttcccctgcggccgggtgagcgtgagccagaccagcaagctgacccgggccgagaccgtgttccccgacgtggactacgtgaacagcaccgaggccgagaccatcctggacaacatcacccagagcacccagagcttcaacgacttcacccgggtggtgggcggcgaggacgccaagcccggccagttcccctggcaggtggtgctgaacggcaaggtggacgccttctgcggcggcagcatcgtgaacgagaagtggatcgtgaccgccgcccactgcgtggagaccggcgtgaagatcaccgtggtggccggcgagcacaacatcgaggagaccgagcacaccgagcagaagcggaacgtgatccggatcatcccccaccacaactacaacgccgccatcaacaagtacaaccacgacatcgccctgctggagctggacgagcccctggtgctgaacagctacgtgacccccatctgcatcgccgacaaggagtacaccaacatcttcctgaagttcggcagcggctacgtgagcggctggggccgggtgttccacaagggctacagcgccctggtgctgcagtacctgcgggtgcccctggtggaccgggccacctgcctggagagcaccaagttccggatctacaacaacatgttctgcgccggcttccacgagggcggccgggacagctgccagggcgacagcggcggcccccacgtgaccgaggtggagggcaccagcttcctgaccggcatcatcagctggggcgaggagtgcgccatgaagggcaagtacggcatctacaccaaggtgagccggtacgtgaactggatcaaggagaagaccaagctgacc

SEQ ID NO: 551 - DNA, 2821 bp, Artificial Sequence
  mouse optimized hFIXss-Pro-mini Intron-Pro-human FIX R338L optimized 0.5
atgcagcgcgtgaacatgattatggccgagagccctggcctgatcaccatctgcctgctgggctacctgctgagcgccgagtgtacaggtttgtttccttttttaaaatacattgagtatgcttgccttttagatatagaaatatctgatgctgtcttcttcactaaattttgattacatgatttgacagcaatattgaagagtctaacagccagcacgcaggttggtaagtactggttctttgttagctaggttttcttcttcttcatttttaaaactaaatagatcgacaatgcttatgatgcatttatgtttaataaacactgttcagttcatgatttggtcatgtaattcctgttagaaaacattcatctccttggtttaaaaaaattaaaagtgggaaaacaaagaaatagcagaatatagtgaaaaaaaataaccacattatttttgtttggacttaccactttgaaatcaaaatgggaaacaaaagcacaaacaatggccttatttacacaaaaagtctgattttaagatatatgacatttcaaggtttcagaagtatgtaatgaggtgtgtctctaattttttaaattatatatcttcaatttaaagttttagttaaaacataaagattaacctttcattagcaagctgttagttatcaccaaagcttttcatggattaggaaaaaatcattttgtctctatgtcaaacatcttggagttgatatttggggaaacacaatactcagttgagttccctaggggagaaaagcaagcttaagaattgacataaagagtaggaagttagctaatgcaacatatatcactttgttttttcacaactacagtgactttatgtatttcccagaggaaggcatacagggaagaaattatcccatttggacaaacagcatgttctcacaggaagcatttatcacacttacttgtcaactttctagaatcaaatctagtagctgacagtaccaggatcaggggtgccaaccctaagcacccccagaaagctgactggccctgtggttcccactccagacatgatgtcagctgtgaaatcgacgtcgctggaccataattaggcttctgttcttcaggagacatttgttcaaagtcatttgggcaaccatattctgaaaacagcccagccagggtgatggatcactttgcaaagatcctcaatgagctattttcaagtgatgacaaagtgtgaagttaaccgctcatttgagaactttctttttcatccaaagtaaattcaaatatgattagaaatctgaccttttattactggaattctcttgactaaaagtaaaattgaattttaattcctaaatctccatgtgtatacagtactgtgggaacatcacagattttggctccatgccctaaagagaaattggctttcagattatttggattaaaaacaaagactttcttaagagatgtaaaattttcatgatgttttcttttttgctaaaactaaagaattattcttttacatttcagtgtttctggatcatgaaaacgccaacaaaattctgaatcggccaaagaggtataattcaggcaaactggaagagtttgtgcaggggaacctggagagagaatgtatggaagaaaagtgtagttttgaagaagcacgagaagtgtttgaaaacactgaaagaacaactgaattttggaagcagtatgtggatggagatcagtgtgagtccaatccatgtctgaatggcggcagttgcaaggatgacattaattcctatgaatgttggtgtccctttggatttgaaggaaagaactgtgaactggatgtgacatgtaacattaagaatggcagatgcgagcagttttgtaaaaatagtgctgataacaaggtggtgtgctcctgtactgagggatatcgactggcagaaaaccagaagtcctgtgaaccagcagtgccatttccatgtggaagagtgtctgtgtcacagacttctaagctgacccgggctgagactgtgtttcctgatgtggactatgtgaattctactgaagctgaaaccattctggataacatcactcagagcacccagtcatttaatgacttcactcgggtggtgggcggagaagatgccaaaccaggccagttcccttggcaggtggtgctgaatggcaaagtggatgcattctgtggaggctctatcgtgaatgaaaaatggattgtgactgctgcccactgtgtggaaactggcgtgaaaattacagtggtcgcaggcgaacataatattgaggagacagaacatacagagcagaagcgaaatgtgattcgaattattcctcaccacaactacaatgcagctattaataagtacaaccatgacattgccctgctggaactggacgaacccctggtgctgaacagctacgtgacacctatttgcattgctgacaaggaatacaccaacatcttcctgaaatttggatctggctatgtgagtggctggggaagagtcttccacaaagggagatcagctctggtgctgcagtacctgagagtgccactggtggaccgagccacatgtctgctgtctacaaagttcaccatctataacaacatgttctgtgctggcttccatgaaggaggcagagattcatgtcagggagatagtgggggaccccatgtgactgaagtggaagggaccagtttcctgactggaattattagctggggcgaagagtgtgcaatgaaaggcaaatatggaatctataccaaggtgtcccggtatgtcaactggattaaggaaaaaacaaagctgact

SEQ ID NO: 552 - DNA, 2821 bp, Artificial Sequence
  mouse optimized hFIXss-Pro-mini Intron-Pro-human FIX R338L optimized 0.8
atgcagcgcgtgaacatgattatggccgagagccctggcctgatcaccatctgcctgctgggctacctgctgagcgccgagtgtacaggtttgtttccttttttaaaatacattgagtatgcttgccttttagatatagaaatatctgatgctgtcttcttcactaaattttgattacatgatttgacagcaatattgaagagtctaacagccagcacgcaggttggtaagtactggttctttgttagctaggttttcttcttcttcatttttaaaactaaatagatcgacaatgcttatgatgcatttatgtttaataaacactgttcagttcatgatttggtcatgtaattcctgttagaaaacattcatctccttggtttaaaaaaattaaaagtgggaaaacaaagaaatagcagaatatagtgaaaaaaaataaccacattatttttgtttggacttaccactttgaaatcaaaatgggaaacaaaagcacaaacaatggccttatttacacaaaaagtctgattttaagatatatgacatttcaaggtttcagaagtatgtaatgaggtgtgtctctaattttttaaattatatatcttcaatttaaagttttagttaaaacataaagattaacctttcattagcaagctgttagttatcaccaaagcttttcatggattaggaaaaaatcattttgtctctatgtcaaacatcttggagttgatatttggggaaacacaatactcagttgagttccctaggggagaaaagcaagcttaagaattgacataaagagtaggaagttagctaatgcaacatatatcactttgttttttcacaactacagtgactttatgtatttcccagaggaaggcatacagggaagaaattatcccatttggacaaacagcatgttctcacaggaagcatttatcacacttacttgtcaactttctagaatcaaatctagtagctgacagtaccaggatcaggggtgccaaccctaagcacccccagaaagctgactggccctgtggttcccactccagacatgatgtcagctgtgaaatcgacgtcgctggaccataattaggcttctgttcttcaggagacatttgttcaaagtcatttgggcaaccatattctgaaaacagcccagccagggtgatggatcactttgcaaagatcctcaatgagctattttcaagtgatgacaaagtgtgaagttaaccgctcatttgagaactttctttttcatccaaagtaaattcaaatatgattagaaatctgaccttttattactggaattctcttgactaaaagtaaaattgaattttaattcctaaatctccatgtgtatacagtactgtgggaacatcacagattttggctccatgccctaaagagaaattggctttcagattatttggattaaaaacaaagactttcttaagagatgtaaaattttcatgatgttttcttttttgctaaaactaaagaattattcttttacatttcagtgtttctggatcacgagaacgccaacaagatcctgaatcggccaaagaggtacaatagcggcaagctggaggagtttgtgcagggcaacctggagagagagtgtatggaggagaagtgtagctttgaggaggcccgggaggtgtttgagaacaccgagagaaccaccgagttttggaagcagtacgtggatggcgatcagtgtgagtccaatccatgtctgaatggcggcagctgcaaggatgacatcaattcctacgagtgttggtgtccctttggctttgagggcaagaactgtgagctggatgtgacctgtaacatcaagaatggcagatgcgagcagttttgtaagaatagcgccgataacaaggtggtgtgctcctgtaccgagggctaccggctggccgagaaccagaagtcctgtgagccagccgtgccatttccatgtggcagagtgagcgtgagccagaccagcaagctgacccgggccgagaccgtgtttcctgatgtggactacgtgaatagcaccgaggccgagaccatcctggataacatcacccagagcacccagagctttaatgacttcacccgggtggtgggcggcgaggatgccaagccaggccagttcccttggcaggtggtgctgaatggcaaggtggatgccttctgtggcggcagcatcgtgaatgagaagtggatcgtgaccgccgcccactgtgtggagaccggcgtgaagatcaccgtggtggccggcgagcacaatatcgaggagaccgagcacaccgagcagaagcggaatgtgatccggatcatccctcaccacaactacaatgccgccatcaataagtacaaccacgacatcgccctgctggagctggacgagcccctggtgctgaacagctacgtgacccctatctgcatcgccgacaaggagtacaccaacatcttcctgaagtttggcagcggctacgtgagcggctggggcagagtgttccacaagggcagaagcgccctggtgctgcagtacctgagagtgccactggtggaccgggccacctgtctgctgagcaccaagttcaccatctacaacaacatgttctgtgccggcttccacgagggcggcagagatagctgtcagggcgatagcggcggcccccacgtgaccgaggtggagggcaccagcttcctgaccggcatcatcagctggggcgaggagtgtgccatgaagggcaagtacggcatctacaccaaggtgtcccggtacgtgaactggatcaaggagaagaccaagctgacc

SEQ ID NO: 553 - DNA, 2821 bp, Artificial Sequence
  mouse optimized hFIXss-Pro-mini Intron-Pro-human FIX R338L optimized 1.0
atgcagcgcgtgaacatgattatggccgagagccctggcctgatcaccatctgcctgctgggctacctgctgagcgccgagtgtacaggtttgtttccttttttaaaatacattgagtatgcttgccttttagatatagaaatatctgatgctgtcttcttcactaaattttgattacatgatttgacagcaatattgaagagtctaacagccagcacgcaggttggtaagtactggttctttgttagctaggttttcttcttcttcatttttaaaactaaatagatcgacaatgcttatgatgcatttatgtttaataaacactgttcagttcatgatttggtcatgtaattcctgttagaaaacattcatctccttggtttaaaaaaattaaaagtgggaaaacaaagaaatagcagaatatagtgaaaaaaaataaccacattatttttgtttggacttaccactttgaaatcaaaatgggaaacaaaagcacaaacaatggccttatttacacaaaaagtctgattttaagatatatgacatttcaaggtttcagaagtatgtaatgaggtgtgtctctaattttttaaattatatatcttcaatttaaagttttagttaaaacataaagattaacctttcattagcaagctgttagttatcaccaaagcttttcatggattaggaaaaaatcattttgtctctatgtcaaacatcttggagttgatatttggggaaacacaatactcagttgagttccctaggggagaaaagcaagcttaagaattgacataaagagtaggaagttagctaatgcaacatatatcactttgttttttcacaactacagtgactttatgtatttcccagaggaaggcatacagggaagaaattatcccatttggacaaacagcatgttctcacaggaagcatttatcacacttacttgtcaactttctagaatcaaatctagtagctgacagtaccaggatcaggggtgccaaccctaagcacccccagaaagctgactggccctgtggttcccactccagacatgatgtcagctgtgaaatcgacgtcgctggaccataattaggcttctgttcttcaggagacatttgttcaaagtcatttgggcaaccatattctgaaaacagcccagccagggtgatggatcactttgcaaagatcctcaatgagctattttcaagtgatgacaaagtgtgaagttaaccgctcatttgagaactttctttttcatccaaagtaaattcaaatatgattagaaatctgaccttttattactggaattctcttgactaaaagtaaaattgaattttaattcctaaatctccatgtgtatacagtactgtgggaacatcacagattttggctccatgccctaaagagaaattggctttcagattatttggattaaaaacaaagactttcttaagagatgtaaaattttcatgatgttttcttttttgctaaaactaaagaattattcttttacatttcagtgttcctggaccacgagaacgccaacaagatcctgaaccggcccaagcggtacaacagcggcaagctggaggagttcgtgcagggcaacctggagcgggagtgcatggaggagaagtgcagcttcgaggaggcccgggaggtgttcgagaacaccgagcggaccaccgagttctggaagcagtacgtggacggcgaccagtgcgagagcaacccctgcctgaacggcggcagctgcaaggacgacatcaacagctacgagtgctggtgccccttcggcttcgagggcaagaactgcgagctggacgtgacctgcaacatcaagaacggccggtgcgagcagttctgcaagaacagcgccgacaacaaggtggtgtgcagctgcaccgagggctaccggctggccgagaaccagaagagctgcgagcccgccgtgcccttcccctgcggccgggtgagcgtgagccagaccagcaagctgacccgggccgagaccgtgttccccgacgtggactacgtgaacagcaccgaggccgagaccatcctggacaacatcacccagagcacccagagcttcaacgacttcacccgggtggtgggcggcgaggacgccaagcccggccagttcccctggcaggtggtgctgaacggcaaggtggacgccttctgcggcggcagcatcgtgaacgagaagtggatcgtgaccgccgcccactgcgtggagaccggcgtgaagatcaccgtggtggccggcgagcacaacatcgaggagaccgagcacaccgagcagaagcggaacgtgatccggatcatcccccaccacaactacaacgccgccatcaacaagtacaaccacgacatcgccctgctggagctggacgagcccctggtgctgaacagctacgtgacccccatctgcatcgccgacaaggagtacaccaacatcttcctgaagttcggcagcggctacgtgagcggctggggccgggtgttccacaagggccggagcgccctggtgctgcagtacctgcgggtgcccctggtggaccgggccacctgcctgctgagcaccaagttcaccatctacaacaacatgttctgcgccggcttccacgagggcggccgggacagctgccagggcgacagcggcggcccccacgtgaccgaggtggagggcaccagcttcctgaccggcatcatcagctggggcgaggagtgcgccatgaagggcaagtacggcatctacaccaaggtgagccggtacgtgaactggatcaaggagaagaccaagctgacc

SEQ ID NO: 554 - DNA, 252 bp, Artificial Sequence
  hybrid liver specific promoter (HLP)
tgtttgctgcttgcaatgtttgcccattttagggtggacacaggacgctgtggtttctgagccagggggcgactcagatcccagccagtggacttagcccctgtttgctcctccgataactggggtgaccttggttaatattcaccagcagcctcccccgttgcccctctggatccactgcttaaatacggacgaggacagggccctgtctcctcagcttcaggcaccaccactgacctgggacagtgaatc

SEQ ID NO: 555 - DNA, 4761 bp, Artificial Sequence
  AAV vector
gggatcatgtaactcgccttgatcgttgggaaccggagctgaatgaagccataccaaacgacgagcgtgacaccacgatgcctgtagcaatggcaacaacgttgcgcaaactattaactggcgaactacttactctagcttcccggcaacaattaatagactggatggaggcggataaagttgcaggaccacttctgcgctcggcccttccggctggctggtttattgctgataaatctggagccggtgagcgtgggtctcgcggtatcattgcagcactggggccagatggtaagccctcccgtatcgtagttatctacacgacggggagtcaggcaactatggatgaacgaaatagacagatcgctgagataggtgcctcactgattaagcattggtaactgtcagaccaagtttactcatatatactttagattgatttaaaacttcatttttaatttaaaaggatctaggtgaagatcctttttgataatctcatgaccaaaatcccttaacgtgagttttcgttccactgagcgtcagaccccgtagaaaagatcaaaggatcttcttgagatcctttttttctgcgcgtaatctgctgcttgcaaacaaaaaaaccaccgctaccagcggtggtttgtttgccggatcaagagctaccaactctttttccgaaggtaactggcttcagcagagcgcagataccaaatactgttcttctagtgtagccgtagttaggccaccacttcaagaactctgtagcaccgcctacatacctcgctctgctaatcctgttaccagtggctgctgccagtggcgataagtcgtgtcttaccgggttggactcaagacgatagttaccggataaggcgcagcggtcgggctgaacggggggttcgtgcacacagcccagcttggagcgaacgacctacaccgaactgagatacctacagcgtgagctatgagaaagcgccacgcttcccgaagggagaaaggcggacaggtatccggtaagcggcagggtcggaacaggagagcgcacgagggagcttccagggggaaacgcctggtatctttatagtcctgtcgggtttcgccacctctgacttgagcgtcgatttttgtgatgctcgtcaggggggcggagcctatggaaaaacgccagcaacgcggcctttttacggttcctggccttttgctggccttttgctcacatgttctttcctgcgttatcccctgattctgtggataaccgtattaccgcctttgagtgagctgataccgctcgccgcagccgaacgaccgagcgcagcgagtcagtgagcgaggaagcggaagagcgcccaatacgcaaaccgcctctccccgcgcgttggccgattcattaatgcagctggcacgacaggtttcccgactggaaagcgggcagtgagcgcaacgcaattaatgtgagttagctcactcattaggcaccccaggctttacactttatgcttccggctcgtatgttgtgtggaattgtgagcggataacaatttcacacaggaaacagctatgaccatgattacgccaagcttgcatgcctgcaggcagctgcgcgctcgctcgctcactgaggccgcccgggcgtcgggcgacctttggtcgcccggcctcagtgagcgagcgagcgcgcagagagggagtggccaactccatcactaggggttcctggaggggtggagtcgtgacgtaaagatctgatatcatcgatcgcgatgcattaattaagcggccgaggctcagaggcacacaggagtttctgggctcaccctgcccccttccaacccctcagttcccatcctccagcagctgtttgtgtgctgcctctgaagtccacactgaacaaacttcagcctactcatgtccctaaaatgggcaaacattgcaagcagcaaacagcaaacacacagccctccctgcctgctgaccttggagctggggcagaggtcagagacctctctgggcccatgccacctccaacatccactcgaccccttggaatttcggtggagaggagcagaggttgtcctggcgtggtttaggtagtgtgagaggggtacccggggatcttgctaccagtggaacagccactaaggattctgcagtgagagcagagggccagctaagtggtactctcccagagactgtctgactcacgccaccccctccaccttggacacaggacgctgtggtttctgagccaggtacaatgactcctttcggtaagtgcagtggaagctgtacactgcccaggcaaagcgtccgggcagcgtaggcgggcgactcagatcccagccagtggacttagcccctgtttgctcctccgataactggggtgaccttggttaatattcaccagcagcctcccccgttgcccctctggatccactgcttaaatacggacgaggacagggccctgtctcctcagcttcaggcaccaccactgacctgggacagtgaatgatccccctgatctgcggcctcgacggtatcgataagcttgatatcgaattctagtcgtcgaccactttcacaatctgctagcaaaggttgccacctgaaagatggatttccaaggttaattcattggaattgaaaattaacagccccccccccccccccctgcagatctcgagccgaattcctgcagcccgggggatcagcctcgactgtgccttctagttgccagccatctgttgtttgcccctcccccgtgccttccttgaccctggaaggtgccactcccactgtcctttcctaataaaatgaggaaattgcatcgcattgtctgagtaggtgtcattctattctggggggtggggtggggcaggacagcaagggggaggattgggaagacaatagcaggcatgctggggatgcggtgggctctatggcttctgaggcggaaagaaccagctggggctcgagatccactagactagtgtacacgcgtgatatcagatctgttacgtagataagtagcatggcgggttaatcattaactacaaggaacccctagtgatggagttggccactccctctctgcgcgctcgctcgctcactgaggccgggcgaccaaaggtcgcccgacgcccgggctttgcccgggcggcctcagtgagcgagcgagcgcgcagctgcctgcaggtcgactctagaggatccccgggtaccgagctcgaattcactggccgtcgttttacaacgtcgtgactgggaaaaccctggcgttacccaacttaatcgccttgcagcacatccccctttcgccagctggcgtaatagcgaagaggcccgcaccgatcgcccttcccaacagttgcgcagcctgaatggcgaatggcgcctgatgcggtattttctccttacgcatctgtgcggtatttcacaccgcatacgtcaaagcaaccatagtacgcgccctgtagcggcgcattaagcgcggcgggtgtggtggttacgcgcagcgtgaccgctacacttgccagcgcttagcgcccgctcctttcgctttcttcccttcctttctcgccacgttcgccggctttccccgtcaagctctaaatcgggggctccctttagggttccgatttagtgctttacggcacctcgaccccaaaaaacttgatttgggtgatggttcacgtagtgggccatcgccctgatagacggtttttcgccctttgacgttggagtccacgttctttaatagtggactcttgttccaaactggaacaacactcaactctatctcgggctattcttttgatttataagggattttgccgatttcggtctattggttaaaaaatgagctgatttaacaaaaatttaacgcgaattttaacaaaatattaacgtttacaattttatggtgcactctcagtacaatctgctctgatgccgcatagttaagccagccccgacacccgccaacacccgctgacgcgccctgacgggcttgtctgctcccggcatccgcttacagacaagctgtgaccgtctccgggagctgcatgtgtcagaggttttcaccgtcatcaccgaaacgcgcgagacgaaagggcctcgtgatacgcctatttttataggttaatgtcatgataataatggtttcttagacgtcaggtggcacttttcggggaaatgtgcgcggaacccctatttgtttatttttctaaatacattcaaatatgtatccgctcatgagacaataaccctgataaatgcttcaataatattgaaaaaggaagagtatgagtattcaacatttccgtgtcgcccttattcccttttttgcggcattttgccttcctgtttttgctcacccagaaacgctggtgaaagtaaaagatgctgaagatcagttgggtgcacgagtgggttacatcgaactggatctcaacagcggtaagatccttgagagttttcgccccgaagaacgttttccaatgatgagcacttttaaagttctgctatgtggcgcggtattatcccgtattgacgccgggcaagagcaactcggtcgccgcatacactattctcagaatgacttggttgagtactcaccagtcacagaaaagcatcttacggatggcatgacagtaagagaattatgcagtgctgccataaccatgagtgataacactgcggccaacttacttctgacaacgatcggaggaccgaaggagctaaccgcttttttgcacaacatgg

SEQ ID NO: 556 - DNA, 22 bp, Artificial Sequence
  FIX fwd sequencing primer
atctacaacaacatgttctgcg

SEQ ID NO: 557 - DNA, 20 bp, Artificial Sequence
  FIX rev sequencing primer
ctgatgatgccggtcagaaa

SEQ ID NO: 558 - DNA, 1299 bp, Artificial Sequence
  human wild type FIX propeptide-mature mouse optimized
gtgttcctggaccacgagaacgccaacaagatcctgaacagacccaagagatacaacagcggcaagctggaagagttcgtgcagggcaacctggaacgcgagtgcatggaagagaagtgcagcttcgaagaggccagagaggtgttcgagaacaccgagagaaccaccgagttctggaagcagtacgtggacggcgaccagtgcgagagcaacccttgtctgaacggcggcagctgcaaggacgacatcaacagctacgagtgctggtgccccttcggcttcgagggcaagaactgcgagctggacgtgacctgcaacatcaagaacggcagatgcgagcagttctgcaagaacagcgccgacaacaaggtcgtgtgctcctgcaccgagggctacagactggccgagaaccagaagtcctgcgagcccgctgtgcctttcccatgcggaagagtgtccgtgtcccagaccagcaagctgaccagagccgagacagtgttccccgacgtggactacgtgaacagcaccgaggccgagacaatcctggacaacatcacccagagcacccagtccttcaacgacttcaccagagtcgtgggcggcgaggatgctaagcctggccagttcccgtggcaggtggtgctgaacggaaaggtggacgccttctgcggcggctccatcgtgaacgagaagtggatcgtgacagccgcccactgcgtggaaaccggcgtgaagatcacagtggtggccggcgagcacaacatcgaggaaaccgagcacacagagcagaaaagaaacgtgatcaggatcatcccccaccacaactacaacgccgccatcaacaagtacaaccacgatatcgccctgctggaactggacgagcccctggtgctgaatagctacgtgacccccatctgtatcgccgacaaagagtacaccaacatctttctgaagttcggcagcggctacgtgtccggctggggcagagtgtttcacaagggcagatccgctctggtgctgcagtacctgagagtgcctctggtggacagagccacctgtctgagaagcaccaagttcaccatctacaacaacatgttctgcgctggcttccacgagggcggcagagactcttgtcagggcgattctggcggccctcacgtgacagaggtggaaggcaccagctttctgaccggcatcatcagctggggcgaggaatgcgccatgaaggggaagtacggcatctacaccaaggtgtccagatacgtgaactggatcaaagaaaagaccaagctgacataa

SEQ ID NO: 559 - DNA, 1299 bp, Artificial Sequence
  human FIX R338L propeptide-mature mouse optimized
gtgttcctggaccacgagaacgccaacaagatcctgaacagacccaagagatacaacagcggcaagctggaagagttcgtgcagggcaacctggaacgcgagtgcatggaagagaagtgcagcttcgaagaggccagagaggtgttcgagaacaccgagagaaccaccgagttctggaagcagtacgtggacggcgaccagtgcgagagcaacccttgtctgaacggcggcagctgcaaggacgacatcaacagctacgagtgctggtgccccttcggcttcgagggcaagaactgcgagctggacgtgacctgcaacatcaagaacggcagatgcgagcagttctgcaagaacagcgccgacaacaaggtcgtgtgctcctgcaccgagggctacagactggccgagaaccagaagtcctgcgagcccgctgtgcctttcccatgcggaagagtgtccgtgtcccagaccagcaagctgaccagagccgagacagtgttccccgacgtggactacgtgaacagcaccgaggccgagacaatcctggacaacatcacccagagcacccagtccttcaacgacttcaccagagtcgtgggcggcgaggatgctaagcctggccagttcccgtggcaggtggtgctgaacggaaaggtggacgccttctgcggcggctccatcgtgaacgagaagtggatcgtgacagccgcccactgcgtggaaaccggcgtgaagatcacagtggtggccggcgagcacaacatcgaggaaaccgagcacacagagcagaaaagaaacgtgatcaggatcatcccccaccacaactacaacgccgccatcaacaagtacaaccacgatatcgccctgctggaactggacgagcccctggtgctgaatagctacgtgacccccatctgtatcgccgacaaagagtacaccaacatctttctgaagttcggcagcggctacgtgtccggctggggcagagtgtttcacaagggcagatccgctctggtgctgcagtacctgagagtgcctctggtggacagagccacctgtctgctgagcaccaagttcaccatctacaacaacatgttctgcgctggcttccacgagggcggcagagactcttgtcagggcgattctggcggccctcacgtgacagaggtggaaggcaccagctttctgaccggcatcatcagctggggcgaggaatgcgccatgaaggggaagtacggcatctacaccaaggtgtccagatacgtgaactggatcaaagaaaagaccaagctgacataa

SEQ ID NO: 560 - DNA, 1299 bp, Artificial Sequence
  human FIX R318Y/R338E/T343R propeptide-mature mouse optimized
gtgttcctggaccacgagaacgccaacaagatcctgaacagacccaagagatacaacagcggcaagctggaagagttcgtgcagggcaacctggaacgcgagtgcatggaagagaagtgcagcttcgaagaggccagagaggtgttcgagaacaccgagagaaccaccgagttctggaagcagtacgtggacggcgaccagtgcgagagcaacccttgtctgaacggcggcagctgcaaggacgacatcaacagctacgagtgctggtgccccttcggcttcgagggcaagaactgcgagctggacgtgacctgcaacatcaagaacggcagatgcgagcagttctgcaagaacagcgccgacaacaaggtcgtgtgctcctgcaccgagggctacagactggccgagaaccagaagtcctgcgagcccgctgtgcctttcccatgcggaagagtgtccgtgtcccagaccagcaagctgaccagagccgagacagtgttccccgacgtggactacgtgaacagcaccgaggccgagacaatcctggacaacatcacccagagcacccagtccttcaacgacttcaccagagtcgtgggcggcgaggatgctaagcctggccagttcccgtggcaggtggtgctgaacggaaaggtggacgccttctgcggcggctccatcgtgaacgagaagtggatcgtgacagccgcccactgcgtggaaaccggcgtgaagatcacagtggtggccggcgagcacaacatcgaggaaaccgagcacacagagcagaaaagaaacgtgatcaggatcatcccccaccacaactacaacgccgccatcaacaagtacaaccacgatatcgccctgctggaactggacgagcccctggtgctgaatagctacgtgacccccatctgtatcgccgacaaagagtacaccaacatctttctgaagttcggcagcggctacgtgtccggctggggcagagtgtttcacaagggctactccgctctggtgctgcagtacctgagagtgcctctggtggacagagccacctgtctggaaagcaccaagttcagaatctacaacaacatgttctgcgctggcttccacgagggcggcagagactcttgtcagggcgattctggcggccctcacgtgacagaggtggaaggcaccagctttctgaccggcatcatcagctggggcgaggaatgcgccatgaaggggaagtacggcatctacaccaaggtgtccagatacgtgaactggatcaaagaaaagaccaagctgacataa

SEQ ID NO: 561 - protein, 736 aa, Artificial sequence; identical to SEQ ID NO: 429
  LK03

SEQ ID NO: 562 - DNA, 1857 bp, Artificial Sequence
  human FIX R318Y/R338E/T343R optimized 1
  intron (1)...(163)
  propeptide (164)...(214)
  exon (215)...(1459)
  cloning vector (1468)...(1857)
gtatacagtactgtgggaacatcacagattttggctccatgccctaaagagaaattggctttcagattatttggattaaaaacaaagactttcttaagagatgtaaaattttcatgatgttttcttttttgctaaaactaaagaattattcttttacatttcagtttttcttgaccatgagaatgccaacaagatcctcaacagacccaagaggtacaactcaggaaagttggaagagtttgtgcagggcaacctggagagagaatgcatggaagaaaaatgctcctttgaggaagccagagaagtctttgagaacactgagaggaccactgaattctggaagcaatatgtggatggggaccagtgtgaaagcaacccttgcctcaatggaggttcctgcaaggatgacatcaacagctatgagtgctggtgcccctttggatttgagggaaagaactgtgaacttgatgtgacctgtaacatcaagaatgggagatgtgaacaattctgcaagaactcagcagacaacaaggtggtctgctcctgcactgaggggtacagacttgcagaaaaccagaaaagctgtgagccagctgtccccttcccttgtgggagagtgtcagtgtctcaaacctccaagctgaccagagctgaaactgtgttccctgatgtggactatgtgaactccactgaagcagaaaccatcttggacaacattacccagtccactcagagcttcaatgacttcaccagagtggtgggaggagaagatgccaagcctggccagttcccttggcaagtggtcctcaatggcaaagtggatgccttctgtgggggctccattgtcaatgagaagtggattgtgactgctgcccactgtgtggagactggtgtcaagatcactgtggtggctggagaacacaacatagaagagacagagcacactgagcagaagaggaatgtcatcaggatcattccacaccacaactacaatgcagccatcaacaagtacaaccatgacattgccttgctggagctggatgaaccactggtgctgaactcctatgtgacccccatttgcattgctgacaaggagtacaccaacattttcctgaagtttggctcaggatatgtctcaggctggggaagagtgttccacaagggctactcagccctggtgctgcagtacctgagggtccccctggtggacagagccacctgtctggaatccaccaagttcaggatctacaacaacatgttctgtgctggattccatgaagggggcagggacagctgccagggagactcaggaggcccccatgtcactgaagtggagggtacctccttcctgactggcattatcagctggggagaagaatgtgctatgaaggggaaatatggaatctacaccaaagtgtccagatatgtgaactggatcaaggaaaagactaagctgacctaatgaaagatggatttccaaggttaattcattggaattgaaaattaacagccccccccccccccccctgcagatctcgagccgaattcctgcagcccgggggatcagcctcgactgtgccttctagttgccagccatctgttgtttgcccctcccccgtgccttccttgaccctggaaggtgccactcccactgtcctttcctaataaaatgaggaaattgcatcgcattgtctgagtaggtgtcattctattctggggggtggggtggggcaggacagcaagggggaggattgggaagacaatagcaggcatgctggggatgcggtgggctctatggcttctgaggcggaaagaaccagctggggctcgagatccactagactagtgtacacgcgt

SEQ ID NO: 563 - DNA, 1857 bp, Artificial Sequence
  human FIX R318Y/R338E/T343R optimized 2
  intron (1)...(163)
  propeptide (164)...(214)
  exon (215)...(1459)
  cloning vector (1468)...(1857)
gtatacagtactgtgggaacatcacagattttggctccatgccctaaagagaaattggctttcagattatttggattaaaaacaaagactttcttaagagatgtaaaattttcatgatgttttcttttttgctaaaactaaagaattattcttttacatttcagtttttcttgaccatgaaaatgccaacaagatcctcaacaggcctaagagatacaactcaggaaagctggaagaatttgtccagggcaacctggaaagggaatgcatggaagaaaagtgctcctttgaggaagccagagaagtgtttgagaacactgaaaggaccactgagttctggaagcagtatgtggatggagatcagtgtgaatccaacccctgcctcaatgggggctcctgcaaagatgacatcaactcttatgagtgctggtgcccttttggatttgagggcaaaaactgtgaactggatgtgacctgtaatatcaagaatggaagatgtgaacaattctgcaagaactcagcagacaacaaagtggtctgcagctgtactgaaggttacagactggctgaaaaccagaagtcctgtgaaccagcagtgcccttcccctgtggaagagtctcagtcagccagacctccaagctgaccagagcagaaactgtgttccctgatgtggattatgtgaacagcactgaagctgaaaccatcctggacaacatcacccagtcaactcagtcctttaatgatttcaccagagtagtgggaggggaagatgcaaagcctggacagttcccttggcaagtggtgctgaatggcaaagtggatgccttctgtgggggaagcattgtgaatgagaagtggattgtgactgctgcccactgtgtggagactggtgtcaagattactgtggtggcaggagaacacaacattgaggaaacagaacacactgagcaaaagaggaatgtgataaggattatcccccaccacaactacaatgcagccatcaacaagtacaaccatgacattgccctgctggagcttgatgaaccactggtgctgaactcatatgtgaccccaatctgcattgctgacaaggagtacaccaacatcttcctgaagtttggatcaggctatgtgtcaggctggggaagagtgttccacaagggctactcagccctggtgctgcaataccttagagtgcctctggtggacagagccacttgcttggagtccaccaagttcaggatctacaacaacatgttctgtgctggtttccatgagggaggcagagacagctgccaaggggactcaggaggaccccatgtcactgaagtggagggaaccagcttcctcactgggatcatctcctggggagaagagtgtgccatgaaggggaaatatgggatctacaccaaagtctccagatatgtcaactggatcaaggaaaagaccaagctcacctgatgaaagatggatttccaaggttaattcattggaattgaaaattaacagccccccccccccccccctgcagatctcgagccgaattcctgcagcccgggggatcagcctcgactgtgccttctagttgccagccatctgttgtttgcccctcccccgtgccttccttgaccctggaaggtgccactcccactgtcctttcctaataaaatgaggaaattgcatcgcattgtctgagtaggtgtcattctattctggggggtggggtggggcaggacagcaagggggaggattgggaagacaatagcaggcatgctggggatgcggtgggctctatggcttctgaggcggaaagaaccagctggggctcgagatccactagactagtgtacacgcgt

SEQ ID NO: 564 - DNA, 1857 bp, Artificial Sequence
  human FIX R318Y/R338E/T343R optimized 3
  intron (1)...(163)
  propeptide (164)...(214)
  exon (215)...(1459)
  cloning vector (1468)...(1857)
gtatacagtactgtgggaacatcacagattttggctccatgccctaaagagaaattggctttcagattatttggattaaaaacaaagactttcttaagagatgtaaaattttcatgatgttttcttttttgctaaaactaaagaattattcttttacatttcagtttttcttgaccatgagaatgccaacaagatcttgaacaggcccaagagatacaactcaggaaagctggaagagtttgtgcaggggaacctggagagagaatgcatggaagaaaagtgctcctttgaggaagccagagaagtgtttgaaaacactgagagaaccactgagttctggaaacaatatgtggatggggaccagtgtgaaagcaacccctgcctcaatggaggctcctgcaaagatgacattaactcctatgagtgctggtgcccttttggctttgaagggaagaactgtgaattggatgtcacttgcaacatcaagaatgggagatgtgaacagttctgcaagaactcagctgacaacaaggtggtctgctcctgcactgaagggtacaggctggcagagaaccaaaaatcctgtgaaccagcagtgcccttcccttgtgggagggtgtcagtcagccaaacctccaagctgactagggctgaaactgtgttccctgatgtggactatgtcaacagcactgaggctgaaacaattctggacaacatcacccagagcacccagtcctttaatgacttcaccagagtggtgggaggagaggatgccaagcctggccagttcccttggcaagtggtgctgaatggaaaagtggatgccttctgtggtggatccattgtcaatgagaaatggattgtgactgctgcccactgtgtggagactggagtcaagatcacagtggtggcaggagagcacaacattgaggaaactgagcacactgagcagaagaggaatgtcattaggatcatcccccaccacaactacaatgctgccattaacaagtacaaccatgacattgccctgcttgaactggatgagcctctggtcctcaactcctatgtgacccccatctgcattgctgacaaggagtacaccaacatcttcctcaagtttggctcaggatatgtgtcaggctggggcagagtgttccacaaaggctactcagccttggtgctgcaatacctgagagtgcccctggtggacagagccacctgtttggaatccactaagttcaggatctacaacaacatgttctgtgctggcttccatgagggtggaagagactcctgccagggagactctggtggtccccatgtcactgaagtggaaggaacctcattcctcactggcatcatcagctggggtgaagagtgtgccatgaaggggaagtatggcatctacaccaaggtgtccagatatgtgaactggatcaaggaaaagaccaagctgacctaatgaaagatggatttccaaggttaattcattggaattgaaaattaacagccccccccccccccccctgcagatctcgagccgaattcctgcagcccgggggatcagcctcgactgtgccttctagttgccagccatctgttgtttgcccctcccccgtgccttccttgaccctggaaggtgccactcccactgtcctttcctaataaaatgaggaaattgcatcgcattgtctgagtaggtgtcattctattctggggggtggggtggggcaggacagcaagggggaggattgggaagacaatagcaggcatgctggggatgcggtgggctctatggcttctgaggcggaaagaaccagctggggctcgagatccactagactagtgtacacgcgt

SEQ ID NO: 565 - DNA, 1858 bp, Artificial Sequence
  human FIX R318Y/R338E/T343R non-optimized
  intron (1)...(163)
  propeptide (164)...(214)
  exon (215)...(1459)
  cloning vector (1468)...(1858)
gtatacagtactgtgggaacatcacagattttggctccatgccctaaagagaaattggctttcagattatttggattaaaaacaaagactttcttaagagatgtaaaattttcatgatgttttcttttttgctaaaactaaagaattattcttttacatttcagtttttcttgatcatgaaaacgccaacaaaattctgaatcggccaaagaggtataattcaggtaaattggaagagtttgttcaagggaaccttgagagagaatgtatggaagaaaagtgtagttttgaagaagcacgagaagtttttgaaaacactgaaagaacaactgaattttggaagcagtatgttgatggagatcagtgtgagtccaatccatgtttaaatggcggcagttgcaaggatgacattaattcctatgaatgttggtgtccctttggatttgaaggaaagaactgtgaattagatgtaacatgtaacattaagaatggcagatgcgagcagttttgtaaaaatagtgctgataacaaggtggtttgctcctgtactgagggatatcgacttgcagaaaaccagaagtcctgtgaaccagcagtgccatttccatgtggaagagtttctgtttcacaaacttctaagctcacccgtgctgagactgtttttcctgatgtggactatgtaaattctactgaagctgaaaccattttggataacatcactcaaagcacccaatcatttaatgacttcactcgggttgttggtggagaagatgccaaaccaggtcaattcccttggcaggttgttttgaatggtaaagttgatgcattctgtggaggctctatcgttaatgaaaaatggattgtaactgctgcccactgtgttgaaactggtgttaaaattacagttgtcgcaggtgaacataatattgaggagacagaacatacagagcaaaagcgaaatgtgattcgaattattcctcaccacaactacaatgcagctattaataagtacaaccatgacattgcccttctggaactggacgaacccttagtgctaaacagctacgttacacctatttgcattgctgacaaggaatacacgaacatcttcctcaaatttggatctggctatgtaagtggctggggaagagtcttccacaaagggtattcagctttagttcttcagtaccttagagttccacttgttgaccgagccacatgtcttgaatctacaaagttcagaatctataacaacatgttctgtgctggcttccatgaaggaggtagagattcatgtcaaggagatagtgggggaccccatgttactgaagtggaagggaccagtttcttaactggaattattagctggggtgaagagtgtgcaatgaaaggcaaatatggaatatataccaaggtatcccggtatgtcaactggattaaggaaaaaacaaagctcacttaatgaaagatggatttccaaggttaattcattggaattgaaaattaacagcccccccccccccccccctgcagatctcgagccgaattcctgcagcccgggggatcagcctcgactgtgccttctagttgccagccatctgttgtttgcccctcccccgtgccttccttgaccctggaaggtgccactcccactgtcctttcctaataaaatgaggaaattgcatcgcattgtctgagtaggtgtcattctattctggggggtggggtggggcaggacagcaagggggaggattgggaagacaatagcaggcatgctggggatgcggtgggctctatggcttctgaggcggaaagaaccagctggggctcgagatccactagactagtgtacacgcgt

SEQ ID NO: 566 - DNA, 1857 bp, Artificial Sequence
  human FIX R318Y/R338E/T343R optimized
  intron (1)...(163)
  propeptide (164)...(214)
  exon (215)...(1459)
  cloning vector (1468)...(1857)
gtatacagtactgtgggaacatcacagattttggctccatgccctaaagagaaattggctttcagattatttggattaaaaacaaagactttcttaagagatgtaaaattttcatgatgttttcttttttgctaaaactaaagaattattcttttacatttcagtttttcttgatcatgaaaatgccaacaaaattctgaataggccaaagaggtataattcaggcaaattggaagagtttgtgcaagggaaccttgagagagaatgtatggaagaaaagtgtagttttgaagaagcaagggaagtgtttgaaaacactgaaagaacaactgaattttggaagcagtatgttgatggagatcagtgtgagtccaatccatgtttaaatggaggcagttgcaaggatgacattaattcctatgaatgttggtgtccctttggatttgaaggaaagaactgtgaattagatgtaacatgtaacattaagaatggcagatgtgagcagttttgtaaaaatagtgctgataacaaggtggtttgctcctgtactgagggatataggcttgcagaaaaccagaagtcctgtgaaccagcagtgccatttccatgtggaagagtgtctgtgtcacaaacttctaagctcaccagagctgagactgtttttcctgatgtggactatgtaaattctactgaagctgaaaccattttggataacatcactcaaagcacccaatcatttaatgacttcactagagttgtgggtggagaagatgccaagccaggtcaattcccttggcaagttgttttgaatggtaaagttgatgcattctgtggaggctctattgttaatgaaaaatggattgtaactgctgcccactgtgttgaaactggtgttaaaattacagtggtggcaggggaacataatattgaggagacagaacatacagagcaaaagaggaatgtgattagaattattcctcaccacaactacaatgcagctattaataagtacaaccatgacattgcccttctggaactggatgaacccttagtgctaaacagctatgttacacctatttgcattgctgacaaggaatacaccaacatcttcctcaaatttggatctggctatgtaagtggctggggaagagtgttccacaaagggtattcagctttagttcttcagtaccttagagtgccacttgttgacagagccacatgtcttgaatctacaaagttcagaatctataacaacatgttctgtgctggcttccatgaaggaggtagagattcatgtcaaggagatagtgggggaccccatgttactgaagtggaaggaaccagtttcttaactggaattattagctggggtgaagagtgtgcaatgaaaggcaaatatggaatatataccaaggtatccagatatgtcaactggattaaggaaaaaacaaagctcacttaatgaaagatggatttccaaggttaattcattggaattgaaaattaacagccccccccccccccccctgcagatctcgagccgaattcctgcagcccgggggatcagcctcgactgtgccttctagttgccagccatctgttgtttgcccctcccccgtgccttccttgaccctggaaggtgccactcccactgtcctttcctaataaaatgaggaaattgcatcgcattgtctgagtaggtgtcattctattctggggggtggggtggggcaggacagcaagggggaggattgggaagacaatagcaggcatgctggggatgcggtgggctctatggcttctgaggcggaaagaaccagctggggctcgagatccactagactagtgtacacgcgt

SEQ ID NO: 567 - DNA, 22 bp, Artificial Sequence
  Forward primer
atctacaacaacatgttctgcg

SEQ ID NO: 568 - DNA, 20 bp, Artificial Sequence
  Reverse primer
ctgatgatgccggtcagaaa

SEQ ID NO: 569 - DNA, 1245 bp, Artificial Sequence
  human FIX R318Y/R338E/T343R mature optimized 1
tacaactcaggaaagttggaagagtttgtgcagggcaacctggagagagaatgcatggaagaaaaatgctcctttgaggaagccagagaagtctttgagaacactgagaggaccactgaattctggaagcaatatgtggatggggaccagtgtgaaagcaacccttgcctcaatggaggttcctgcaaggatgacatcaacagctatgagtgctggtgcccctttggatttgagggaaagaactgtgaacttgatgtgacctgtaacatcaagaatgggagatgtgaacaattctgcaagaactcagcagacaacaaggtggtctgctcctgcactgaggggtacagacttgcagaaaaccagaaaagctgtgagccagctgtccccttcccttgtgggagagtgtcagtgtctcaaacctccaagctgaccagagctgaaactgtgttccctgatgtggactatgtgaactccactgaagcagaaaccatcttggacaacattacccagtccactcagagcttcaatgacttcaccagagtggtgggaggagaagatgccaagcctggccagttcccttggcaagtggtcctcaatggcaaagtggatgccttctgtgggggctccattgtcaatgagaagtggattgtgactgctgcccactgtgtggagactggtgtcaagatcactgtggtggctggagaacacaacatagaagagacagagcacactgagcagaagaggaatgtcatcaggatcattccacaccacaactacaatgcagccatcaacaagtacaaccatgacattgccttgctggagctggatgaaccactggtgctgaactcctatgtgacccccatttgcattgctgacaaggagtacaccaacattttcctgaagtttggctcaggatatgtctcaggctggggaagagtgttccacaagggctactcagccctggtgctgcagtacctgagggtccccctggtggacagagccacctgtctggaatccaccaagttcaggatctacaacaacatgttctgtgctggattccatgaagggggcagggacagctgccagggagactcaggaggcccccatgtcactgaagtggagggtacctccttcctgactggcattatcagctggggagaagaatgtgctatgaaggggaaatatggaatctacaccaaagtgtccagatatgtgaactggatcaaggaaaagactaagctgacc

SEQ ID NO: 570 - DNA, 1245 bp, Artificial Sequence
  human FIX R318Y/R338E/T343R mature optimized 2
tacaactcaggaaagctggaagaatttgtccagggcaacctggaaagggaatgcatggaagaaaagtgctcctttgaggaagccagagaagtgtttgagaacactgaaaggaccactgagttctggaagcagtatgtggatggagatcagtgtgaatccaacccctgcctcaatgggggctcctgcaaagatgacatcaactcttatgagtgctggtgcccttttggatttgagggcaaaaactgtgaactggatgtgacctgtaatatcaagaatggaagatgtgaacaattctgcaagaactcagcagacaacaaagtggtctgcagctgtactgaaggttacagactggctgaaaaccagaagtcctgtgaaccagcagtgcccttcccctgtggaagagtctcagtcagccagacctccaagctgaccagagcagaaactgtgttccctgatgtggattatgtgaacagcactgaagctgaaaccatcctggacaacatcacccagtcaactcagtcctttaatgatttcaccagagtagtgggaggggaagatgcaaagcctggacagttcccttggcaagtggtgctgaatggcaaagtggatgccttctgtgggggaagcattgtgaatgagaagtggattgtgactgctgcccactgtgtggagactggtgtcaagattactgtggtggcaggagaacacaacattgaggaaacagaacacactgagcaaaagaggaatgtgataaggattatcccccaccacaactacaatgcagccatcaacaagtacaaccatgacattgccctgctggagcttgatgaaccactggtgctgaactcatatgtgaccccaatctgcattgctgacaaggagtacaccaacatcttcctgaagtttggatcaggctatgtgtcaggctggggaagagtgttccacaagggctactcagccctggtgctgcaataccttagagtgcctctggtggacagagccacttgcttggagtccaccaagttcaggatctacaacaacatgttctgtgctggtttccatgagggaggcagagacagctgccaaggggactcaggaggaccccatgtcactgaagtggagggaaccagcttcctcactgggatcatctcctggggagaagagtgtgccatgaaggggaaatatgggatctacaccaaagtctccagatatgtcaactggatcaaggaaaagaccaagctcacc

SEQ ID NO: 571 - DNA, 1245 bp, Artificial Sequence
  human FIX R318Y/R338E/T343R mature optimized 3
tacaactcaggaaagctggaagagtttgtgcaggggaacctggagagagaatgcatggaagaaaagtgctcctttgaggaagccagagaagtgtttgaaaacactgagagaaccactgagttctggaaacaatatgtggatggggaccagtgtgaaagcaacccctgcctcaatggaggctcctgcaaagatgacattaactcctatgagtgctggtgcccttttggctttgaagggaagaactgtgaattggatgtcacttgcaacatcaagaatgggagatgtgaacagttctgcaagaactcagctgacaacaaggtggtctgctcctgcactgaagggtacaggctggcagagaaccaaaaatcctgtgaaccagcagtgcccttcccttgtgggagggtgtcagtcagccaaacctccaagctgactagggctgaaactgtgttccctgatgtggactatgtcaacagcactgaggctgaaacaattctggacaacatcacccagagcacccagtcctttaatgacttcaccagagtggtgggaggagaggatgccaagcctggccagttcccttggcaagtggtgctgaatggaaaagtggatgccttctgtggtggatccattgtcaatgagaaatggattgtgactgctgcccactgtgtggagactggagtcaagatcacagtggtggcaggagagcacaacattgaggaaactgagcacactgagcagaagaggaatgtcattaggatcatcccccaccacaactacaatgctgccattaacaagtacaaccatgacattgccctgcttgaactggatgagcctctggtcctcaactcctatgtgacccccatctgcattgctgacaaggagtacaccaacatcttcctcaagtttggctcaggatatgtgtcaggctggggcagagtgttccacaaaggctactcagccttggtgctgcaatacctgagagtgcccctggtggacagagccacctgtttggaatccactaagttcaggatctacaacaacatgttctgtgctggcttccatgagggtggaagagactcctgccagggagactctggtggtccccatgtcactgaagtggaaggaacctcattcctcactggcatcatcagctggggtgaagagtgtgccatgaaggggaagtatggcatctacaccaaggtgtccagatatgtgaactggatcaaggaaaagaccaagctgacc

SEQ ID NO: 572 - DNA, 7585 bp, Artificial Sequence
  AAV-hFIX (R318Y/R338E/T343R) optimized 1
  repeat_region (1597)...(1715): ITR
  enhancer (1781)...(2101): ApoE/C1
  promoter (2111)...(2503): huSerpin A antitrypsin liver specific promoter (partial)
  misc_feature (2598)...(2603): kozak
  sig_peptide (2604)...(2687): FIX signal sequence
  misc_feature (2688)...(2690): FIX propeptide sequence
  intron (2691)...(4128): FIX partial intron 1
  misc_feature (4129)...(4179): FIX propeptide sequence
  misc_feature (4180)...(5424): FIX Zymogen
  polyA_signal (5539)...(5763): bovine growth hormone polyadenylation signal
  repeat_region (5877)...(6006): ITR
gggatcatgtaactcgccttgatcgttgggaaccggagctgaatgaagccataccaaacgacgagcgtgacaccacgatgcctgtagcaatggcaacaacgttgcgcaaactattaactggcgaactacttactctagcttcccggcaacaattaatagactggatggaggcggataaagttgcaggaccacttctgcgctcggcccttccggctggctggtttattgctgataaatctggagccggtgagcgtgggtctcgcggtatcattgcagcactggggccagatggtaagccctcccgtatcgtagttatctacacgacggggagtcaggcaactatggatgaacgaaatagacagatcgctgagataggtgcctcactgattaagcattggtaactgtcagaccaagtttactcatatatactttagattgatttaaaacttcatttttaatttaaaaggatctaggtgaagatcctttttgataatctcatgaccaaaatcccttaacgtgagttttcgttccactgagcgtcagaccccgtagaaaagatcaaaggatcttcttgagatcctttttttctgcgcgtaatctgctgcttgcaaacaaaaaaaccaccgctaccagcggtggtttgtttgccggatcaagagctaccaactctttttccgaaggtaactggcttcagcagagcgcagataccaaatactgttcttctagtgtagccgtagttaggccaccacttcaagaactctgtagcaccgcctacatacctcgctctgctaatcctgttaccagtggctgctgccagtggcgataagtcgtgtcttaccgggttggactcaagacgatagttaccggataaggcgcagcggtcgggctgaacggggggttcgtgcacacagcccagcttggagcgaacgacctacaccgaactgagatacctacagcgtgagctatgagaaagcgccacgcttcccgaagggagaaaggcggacaggtatccggtaagcggcagggtcggaacaggagagcgcacgagggagcttccagggggaaacgcctggtatctttatagtcctgtcgggtttcgccacctctgacttgagcgtcgatttttgtgatgctcgtcaggggggcggagcctatggaaaaacgccagcaacgcggcctttttacggttcctggccttttgctggccttttgctcacatgttctttcctgcgttatcccctgattctgtggataaccgtattaccgcctttgagtgagctgataccgctcgccgcagccgaacgaccgagcgcagcgagtcagtgagcgaggaagcggaagagcgcccaatacgcaaaccgcctctccccgcgcgttggccgattcattaatgcagctggcacgacaggtttcccgactggaaagcgggcagtgagcgcaacgcaattaatgtgagttagctcactcattaggcaccccaggctttacactttatgcttccggctcgtatgttgtgtggaattgtgagcggataacaatttcacacaggaaacagctatgaccatgattacgccaagcttgcatgcctgcaggcagctgcgcgctcgctcgctcactgaggccgcccgggcgtcgggcgacctttggtcgcccggcctcagtgagcgagcgagcgcgcagagagggagtggccaactccatcactaggggttcctggaggggtggagtcgtgacgtaaagatctgatatcatcgatcgcgatgcattaattaagcggccgaggctcagaggcacacaggagtttctgggctcaccctgcccccttccaacccctcagttcccatcctccagcagctgtttgtgtgctgcctctgaagtccacactgaacaaacttcagcctactcatgtccctaaaatgggcaaacattgcaagcagcaaacagcaaacacacagccctccctgcctgctgaccttggagctggggcagaggtcagagacctctctgggcccatgccacctccaacatccactcgaccccttggaatttcggtggagaggagcagaggttgtcctggcgtggtttaggtagtgtgagaggggtacccggggatcttgctaccagtggaacagccactaaggattctgcagtgagagcagagggccagctaagtggtactctcccagagactgtctgactcacgccaccccctccaccttggacacaggacgctgtggtttctgagccaggtacaatgactcctttcggtaagtgcagtggaagctgtacactgcccaggcaaagcgtccgggcagcgtaggcgggcgactcagatcccagccagtggacttagcccctgtttgctcctccgataactggggtgaccttggttaatattcaccagcagcctcccccgttgcccctctggatccactgcttaaatacggacgaggacagggccctgtctcctcagcttcaggcaccaccactgacctgggacagtgaatgatccccctgatctgcggcctcgacggtatcgataagcttgatatcgaattctagtcgtcgaccactttcacaatctgctagcaaaggttgccaccatgcagcgcgtgaacatgatcatggcagaatcaccaggcctcatcaccatctgccttttaggatatctactcagtgctgaatgtacaggtttgtttccttttttaaaatacattgagtatgcttgccttttagatatagaaatatctgatgctgtcttcttcactaaattttgattacatgatttgacagcaatattgaagagtctaacagccagcacgcaggttggtaagtactggttctttgttagctaggttttcttcttcttcatttttaaaactaaatagatcgacaatgcttatgatgcatttatgtttaataaacactgttcagttcatgatttggtcatgtaattcctgttagaaaacattcatctccttggtttaaaaaaattaaaagtgggaaaacaaagaaatagcagaatatagtgaaaaaaaataaccacattatttttgtttggacttaccactttgaaatcaaaatgggaaacaaaagcacaaacaatggccttatttacacaaaaagtctgattttaagatatatgacatttcaaggtttcagaagtatgtaatgaggtgtgtctctaattttttaaattatatatcttcaatttaaagttttagttaaaacataaagattaacctttcattagcaagctgttagttatcaccaaagcttttcatggattaggaaaaaatcattttgtctctatgtcaaacatcttggagttgatatttggggaaacacaatactcagttgagttccctaggggagaaaagcaagcttaagaattgacataaagagtaggaagttagctaatgcaacatatatcactttgttttttcacaactacagtgactttatgtatttcccagaggaaggcatacagggaagaaattatcccatttggacaaacagcatgttctcacaggaagcatttatcacacttacttgtcaactttctagaatcaaatctagtagctgacagtaccaggatcaggggtgccaaccctaagcacccccagaaagctgactggccctgtggttcccactccagacatgatgtcagctgtgaaatcgacgtcgctggaccataattaggcttctgttcttcaggagacatttgttcaaagtcatttgggcaaccatattctgaaaacagcccagccagggtgatggatcactttgcaaagatcctcaatgagctattttcaagtgatgacaaagtgtgaagttaaccgctcatttgagaactttctttttcatccaaagtaaattcaaatatgattagaaatctgaccttttattactggaattctcttgactaaaagtaaaattgaattttaattcctaaatctccatgtgtatacagtactgtgggaacatcacagattttggctccatgccctaaagagaaattggctttcagattatttggattaaaaacaaagactttcttaagagatgtaaaattttcatgatgttttcttttttgctaaaactaaagaattattcttttacatttcagtttttcttgaccatgagaatgccaacaagatcctcaacagacccaagaggtacaactcaggaaagttggaagagtttgtgcagggcaacctggagagagaatgcatggaagaaaaatgctcctttgaggaagccagagaagtctttgagaacactgagaggaccactgaattctggaagcaatatgtggatggggaccagtgtgaaagcaacccttgcctcaatggaggttcctgcaaggatgacatcaacagctatgagtgctggtgcccctttggatttgagggaaagaactgtgaacttgatgtgacctgtaacatcaagaatgggagatgtgaacaattctgcaagaactcagcagacaacaaggtggtctgctcctgcactgaggggtacagacttgcagaaaaccagaaaagctgtgagccagctgtccccttcccttgtgggagagtgtcagtgtctcaaacctccaagctgaccagagctgaaactgtgttccctgatgtggactatgtgaactccactgaagcagaaaccatcttggacaacattacccagtccactcagagcttcaatgacttcaccagagtggtgggaggagaagatgccaagcctggccagttcccttggcaagtggtcctcaatggcaaagtggatgccttctgtgggggctccattgtcaatgagaagtggattgtgactgctgcccactgtgtggagactggtgtcaagatcactgtggtggctggagaacacaacatagaagagacagagcacactgagcagaagaggaatgtcatcaggatcattccacaccacaactacaatgcagccatcaacaagtacaaccatgacattgccttgctggagctggatgaaccactggtgctgaactcctatgtgacccccatttgcattgctgacaaggagtacaccaacattttcctgaagtttggctcaggatatgtctcaggctggggaagagtgttccacaagggctactcagccctggtgctgcagtacctgagggtccccctggtggacagagccacctgtctggaatccaccaagttcaggatctacaacaacatgttctgtgctggattccatgaagggggcagggacagctgccagggagactcaggaggcccccatgtcactgaagtggagggtacctccttcctgactggcattatcagctggggagaagaatgtgctatgaaggggaaatatggaatctacaccaaagtgtccagatatgtgaactggatcaaggaaaagactaagctgacctaatgaaagatggatttccaaggttaattcattggaattgaaaattaacagccccccccccccccccctgcagatctcgagccgaattcctgcagcccgggggatcagcctcgactgtgccttctagttgccagccatctgttgtttgcccctcccccgtgccttccttgaccctggaaggtgccactcccactgtcctttcctaataaaatgaggaaattgcatcgcattgtctgagtaggtgtcattctattctggggggtggggtggggcaggacagcaagggggaggattgggaagacaatagcaggcatgctggggatgcggtgggctctatggcttctgaggcggaaagaaccagctggggctcgagatccactagactagtgtacacgcgtgatatcagatctgttacgtagataagtagcatggcgggttaatcattaactacaaggaacccctagtgatggagttggccactccctctctgcgcgctcgctcgctcactgaggccgggcgaccaaaggtcgcccgacgcccgggctttgcccgggcggcctcagtgagcgagcgagcgcgcagctgcctgcaggtcgactctagaggatccccgggtaccgagctcgaattcactggccgtcgttttacaacgtcgtgactgggaaaaccctggcgttacccaacttaatcgccttgcagcacatccccctttcgccagctggcgtaatagcgaagaggcccgcaccgatcgcccttcccaacagttgcgcagcctgaatggcgaatggcgcctgatgcggtattttctccttacgcatctgtgcggtatttcacaccgcatacgtcaaagcaaccatagtacgcgccctgtagcggcgcattaagcgcggcgggtgtggtggttacgcgcagcgtgaccgctacacttgccagcgcttagcgcccgctcctttcgctttcttcccttcctttctcgccacgttcgccggctttccccgtcaagctctaaatcgggggctccctttagggttccgatttagtgctttacggcacctcgaccccaaaaaacttgatttgggtgatggttcacgtagtgggccatcgccctgatagacggtttttcgccctttgacgttggagtccacgttctttaatagtggactcttgttccaaactggaacaacactcaactctatctcgggctattcttttgatttataagggattttgccgatttcggtctattggttaaaaaatgagctgatttaacaaaaatttaacgcgaattttaacaaaatattaacgtttacaattttatggtgcactctcagtacaatctgctctgatgccgcatagttaagccagccccgacacccgccaacacccgctgacgcgccctgacgggcttgtctgctcccggcatccgcttacagacaagctgtgaccgtctccgggagctgcatgtgtcagaggttttcaccgtcatcaccgaaacgcgcgagacgaaagggcctcgtgatacgcctatttttataggttaatgtcatgataataatggtttcttagacgtcaggtggcacttttcggggaaatgtgcgcggaacccctatttgtttatttttctaaatacattcaaatatgtatccgctcatgagacaataaccctgataaatgcttcaataatattgaaaaaggaagagtatgagtattcaacatttccgtgtcgcccttattcccttttttgcggcattttgccttcctgtttttgctcacccagaaacgctggtgaaagtaaaagatgctgaagatcagttgggtgcacgagtgggttacatcgaactggatctcaacagcggtaagatccttgagagttttcgccccgaagaacgttttccaatgatgagcacttttaaagttctgctatgtggcgcggtattatcccgtattgacgccgggcaagagcaactcggtcgccgcatacactattctcagaatgacttggttgagtactcaccagtcacagaaaagcatcttacggatggcatgacagtaagagaattatgcagtgctgccataaccatgagtgataacactgcggccaacttacttctgacaacgatcggaggaccgaaggagctaaccgcttttttgcacaacatgg

SEQ ID NO: 573 - DNA, 7585 bp, Artificial Sequence
  AAV-hFIX (R318Y/R338E/T343R) optimized 2
  repeat_region (1597)...(1715): ITR
  enhancer (1781)...(2101): ApoE/C1
  promoter (2111)...(2503): huSerpin A antitrypsin liver specific promoter (partial)
  misc_feature (2598)...(2603): kozak
  sig_peptide (2604)...(2687): FIX signal sequence
  misc_feature (2688)...(2690): FIX propeptide sequence
  intron (2691)...(4128): FIX partial intron 1
  misc_feature (4129)...(4179): FIX propeptide sequence
  misc_feature (4180)...(5424): FIX Zymogen
  polyA_signal (5539)...(5763): bovine growth hormone polyadenylation signal
  repeat_region (5877)...(6006): ITR
gggatcatgtaactcgccttgatcgttgggaaccggagctgaatgaagccataccaaacgacgagcgtgacaccacgatgcctgtagcaatggcaacaacgttgcgcaaactattaactggcgaactacttactctagcttcccggcaacaattaatagactggatggaggcggataaagttgcaggaccacttctgcgctcggcccttccggctggctggtttattgctgataaatctggagccggtgagcgtgggtctcgcggtatcattgcagcactggggccagatggtaagccctcccgtatcgtagttatctacacgacggggagtcaggcaactatggatgaacgaaatagacagatcgctgagataggtgcctcactgattaagcattggtaactgtcagaccaagtttactcatatatactttagattgatttaaaacttcatttttaatttaaaaggatctaggtgaagatcctttttgataatctcatgaccaaaatcccttaacgtgagttttcgttccactgagcgtcagaccccgtagaaaagatcaaaggatcttcttgagatcctttttttctgcgcgtaatctgctgcttgcaaacaaaaaaaccaccgctaccagcggtggtttgtttgccggatcaagagctaccaactctttttccgaaggtaactggcttcagcagagcgcagataccaaatactgttcttctagtgtagccgtagttaggccaccacttcaagaactctgtagcaccgcctacatacctcgctctgctaatcctgttaccagtggctgctgccagtggcgataagtcgtgtcttaccgggttggactcaagacgatagttaccggataaggcgcagcggtcgggctgaacggggggttcgtgcacacagcccagcttggagcgaacgacctacaccgaactgagatacctacagcgtgagctatgagaaagcgccacgcttcccgaagggagaaaggcggacaggtatccggtaagcggcagggtcggaacaggagagcgcacgagggagcttccagggggaaacgcctggtatctttatagtcctgtcgggtttcgccacctctgacttgagcgtcgatttttgtgatgctcgtcaggggggcggagcctatggaaaaacgccagcaacgcggcctttttacggttcctggccttttgctggccttttgctcacatgttctttcctgcgttatcccctgattctgtggataaccgtattaccgcctttgagtgagctgataccgctcgccgcagccgaacgaccgagcgcagcgagtcagtgagcgaggaagcggaagagcgcccaatacgcaaaccgcctctccccgcgcgttggccgattcattaatgcagctggcacgacaggtttcccgactggaaagcgggcagtgagcgcaacgcaattaatgtgagttagctcactcattaggcaccccaggctttacactttatgcttccggctcgtatgttgtgtggaattgtgagcggataacaatttcacacaggaaacagctatgaccatgattacgccaagcttgcatgcctgcaggcagctgcgcgctcgctcgctcactgaggccgcccgggcgtcgggcgacctttggtcgcccggcctcagtgagcgagcgagcgcgcagagagggagtggccaactccatcactaggggttcctggaggggtggagtcgtgacgtaaagatctgatatcatcgatcgcgatgcattaattaagcggccgaggctcagaggcacacaggagtttctgggctcaccctgcccccttccaacccctcagttcccatcctccagcagctgtttgtgtgctgcctctgaagtccacactgaacaaacttcagcctactcatgtccctaaaatgggcaaacattgcaagcagcaaacagcaaacacacagccctccctgcctgctgaccttggagctggggcagaggtcagagacctctctgggcccatgccacctccaacatccactcgaccccttggaatttcggtggagaggagcagaggttgtcctggcgtggtttaggtagtgtgagaggggtacccggggatcttgctaccagtggaacagccactaaggattctgcagtgagagcagagggccagctaagtggtactctcccagagactgtctgactcacgccaccccctccaccttggacacaggacgctgtggtttctgagccaggtacaatgactcctttcggtaagtgcagtggaagctgtacactgcccaggcaaagcgtccgggcagcgtaggcgggcgactcagatcccagccagtggacttagcccctgtttgctcctccgataactggggtgaccttggttaatattcaccagcagcctcccccgttgcccctctggatccactgcttaaatacggacgaggacagggccctgtctcctcagcttcaggcaccaccactgacctgggacagtgaatgatccccctgatctgcggcctcgacggtatcgataagcttgatatcgaattctagtcgtcgaccactttcacaatctgctagcaaaggttgccaccatgcagcgcgtgaacatgatcatggcagaatcaccaggcctcatcaccatctgccttttaggatatctactcagtgctgaatgtacaggtttgtttccttttttaaaatacattgagtatgcttgccttttagatatagaaatatctgatgctgtcttcttcactaaattttgattacatgatttgacagcaatattgaagagtctaacagccagcacgcaggttggtaagtactggttctttgttagctaggttttcttcttcttcatttttaaaactaaatagatcgacaatgcttatgatgcatttatgtttaataaacactgttcagttcatgatttggtcatgtaattcctgttagaaaacattcatctccttggtttaaaaaaattaaaagtgggaaaacaaagaaatagcagaatatagtgaaaaaaaataaccacattatttttgtttggacttaccactttgaaatcaaaatgggaaacaaaagcacaaacaatggccttatttacacaaaaagtctgattttaagatatatgacatttcaaggtttcagaagtatgtaatgaggtgtgtctctaattttttaaattatatatcttcaatttaaagttttagttaaaacataaagattaacctttcattagcaagctgttagttatcaccaaagcttttcatggattaggaaaaaatcattttgtctctatgtcaaacatcttggagttgatatttggggaaacacaatactcagttgagttccctaggggagaaaagcaagcttaagaattgacataaagagtaggaagttagctaatgcaacatatatcactttgttttttcacaactacagtgactttatgtatttcccagaggaaggcatacagggaagaaattatcccatttggacaaacagcatgttctcacaggaagcatttatcacacttacttgtcaactttctagaatcaaatctagtagctgacagtaccaggatcaggggtgccaaccctaagcacccccagaaagctgactggccctgtggttcccactccagacatgatgtcagctgtgaaatcgacgtcgctggaccataattaggcttctgttcttcaggagacatttgttcaaagtcatttgggcaaccatattctgaaaacagcccagccagggtgatggatcactttgcaaagatcctcaatgagctattttcaagtgatgacaaagtgtgaagttaaccgctcatttgagaactttctttttcatccaaagtaaattcaaatatgattagaaatctgaccttttattactggaattctcttgactaaaagtaaaattgaattttaattcctaaatctccatgtgtatacagtactgtgggaacatcacagattttggctccatgccctaaagagaaattggctttcagattatttggattaaaaacaaagactttcttaagagatgtaaaattttcatgatgttttcttttttgctaaaactaaagaattattcttttacatttcagtttttcttgaccatgaaaatgccaacaagatcctcaacaggcctaagagatacaactcaggaaagctggaagaatttgtccagggcaacctggaaagggaatgcatggaagaaaagtgctcctttgaggaagccagagaagtgtttgagaacactgaaaggaccactgagttctggaagcagtatgtggatggagatcagtgtgaatccaacccctgcctcaatgggggctcctgcaaagatgacatcaactcttatgagtgctggtgcccttttggatttgagggcaaaaactgtgaactggatgtgacctgtaatatcaagaatggaagatgtgaacaattctgcaagaactcagcagacaacaaagtggtctgcagctgtactgaaggttacagactggctgaaaaccagaagtcctgtgaaccagcagtgcccttcccctgtggaagagtctcagtcagccagacctccaagctgaccagagcagaaactgtgttccctgatgtggattatgtgaacagcactgaagctgaaaccatcctggacaacatcacccagtcaactcagtcctttaatgatttcaccagagtagtgggaggggaagatgcaaagcctggacagttcccttggcaagtggtgctgaatggcaaagtggatgccttctgtgggggaagcattgtgaatgagaagtggattgtgactgctgcccactgtgtggagactggtgtcaagattactgtggtggcaggagaacacaacattgaggaaacagaacacactgagcaaaagaggaatgtgataaggattatcccccaccacaactacaatgcagccatcaacaagtacaaccatgacattgccctgctggagcttgatgaaccactggtgctgaactcatatgtgaccccaatctgcattgctgacaaggagtacaccaacatcttcctgaagtttggatcaggctatgtgtcaggctggggaagagtgttccacaagggctactcagccctggtgctgcaataccttagagtgcctctggtggacagagccacttgcttggagtccaccaagttcaggatctacaacaacatgttctgtgctggtttccatgagggaggcagagacagctgccaaggggactcaggaggaccccatgtcactgaagtggagggaaccagcttcctcactgggatcatctcctggggagaagagtgtgccatgaaggggaaatatgggatctacaccaaagtctccagatatgtcaactggatcaaggaaaagaccaagctcacctaatgaaagatggatttccaaggttaattcattggaattgaaaattaacagccccccccccccccccctgcagatctcgagccgaattcctgcagcccgggggatcagcctcgactgtgccttctagttgccagccatctgttgtttgcccctcccccgtgccttccttgaccctggaaggtgccactcccactgtcctttcctaataaaatgaggaaattgcatcgcattgtctgagtaggtgtcattctattctggggggtggggtggggcaggacagcaagggggaggattgggaagacaatagcaggcatgctggggatgcggtgggctctatggcttctgaggcggaaagaaccagctggggctcgagatccactagactagtgtacacgcgtgatatcagatctgttacgtagataagtagcatggcgggttaatcattaactacaaggaacccctagtgatggagttggccactccctctctgcgcgctcgctcgctcactgaggccgggcgaccaaaggtcgcccgacgcccgggctttgcccgggcggcctcagtgagcgagcgagcgcgcagctgcctgcaggtcgactctagaggatccccgggtaccgagctcgaattcactggccgtcgttttacaacgtcgtgactgggaaaaccctggcgttacccaacttaatcgccttgcagcacatccccctttcgccagctggcgtaatagcgaagaggcccgcaccgatcgcccttcccaacagttgcgcagcctgaatggcgaatggcgcctgatgcggtattttctccttacgcatctgtgcggtatttcacaccgcatacgtcaaagcaaccatagtacgcgccctgtagcggcgcattaagcgcggcgggtgtggtggttacgcgcagcgtgaccgctacacttgccagcgcttagcgcccgctcctttcgctttcttcccttcctttctcgccacgttcgccggctttccccgtcaagctctaaatcgggggctccctttagggttccgatttagtgctttacggcacctcgaccccaaaaaacttgatttgggtgatggttcacgtagtgggccatcgccctgatagacggtttttcgccctttgacgttggagtccacgttctttaatagtggactcttgttccaaactggaacaacactcaactctatctcgggctattcttttgatttataagggattttgccgatttcggtctattggttaaaaaatgagctgatttaacaaaaatttaacgcgaattttaacaaaatattaacgtttacaattttatggtgcactctcagtacaatctgctctgatgccgcatagttaagccagccccgacacccgccaacacccgctgacgcgccctgacgggcttgtctgctcccggcatccgcttacagacaagctgtgaccgtctccgggagctgcatgtgtcagaggttttcaccgtcatcaccgaaacgcgcgagacgaaagggcctcgtgatacgcctatttttataggttaatgtcatgataataatggtttcttagacgtcaggtggcacttttcggggaaatgtgcgcggaacccctatttgtttatttttctaaatacattcaaatatgtatccgctcatgagacaataaccctgataaatgcttcaataatattgaaaaaggaagagtatgagtattcaacatttccgtgtcgcccttattcccttttttgcggcattttgccttcctgtttttgctcacccagaaacgctggtgaaagtaaaagatgctgaagatcagttgggtgcacgagtgggttacatcgaactggatctcaacagcggtaagatccttgagagttttcgccccgaagaacgttttccaatgatgagcacttttaaagttctgctatgtggcgcggtattatcccgtattgacgccgggcaagagcaactcggtcgccgcatacactattctcagaatgacttggttgagtactcaccagtcacagaaaagcatcttacggatggcatgacagtaagagaattatgcagtgctgccataaccatgagtgataacactgcggccaacttacttctgacaacgatcggaggaccgaaggagctaaccgcttttttgcacaacatgg

SEQ ID NO: 574 - DNA, 7585 bp, Artificial Sequence
  AAV-hFIX (R318Y/R338E/T343R) optimized 3
  repeat_region (1597)...(1715): ITR
  enhancer (1781)...(2101): ApoE/C1
  promoter (2111)...(2503): huSerpin A antitrypsin liver specific promoter (partial)
  misc_feature (2598)...(2603): kozak
  sig_peptide (2604)...(2687): FIX signal sequence
  misc_feature (2688)...(2690): FIX propeptide sequence
  intron (2691)...(4128): FIX partial intron 1
  misc_feature (4129)...(4179): FIX propeptide sequence
  misc_feature (4180)...(5424): FIX Zymogen
  polyA_signal (5539)...(5763): bovine growth hormone polyadenylation signal
  repeat_region (5877)...(6006): ITR
gggatcatgtaactcgccttgatcgttgggaaccggagctgaatgaagccataccaaacgacgagcgtgacaccacgatgcctgtagcaatggcaacaacgttgcgcaaactattaactggcgaactacttactctagcttcccggcaacaattaatagactggatggaggcggataaagttgcaggaccacttctgcgctcggcccttccggctggctggtttattgctgataaatctggagccggtgagcgtgggtctcgcggtatcattgcagcactggggccagatggtaagccctcccgtatcgtagttatctacacgacggggagtcaggcaactatggatgaacgaaatagacagatcgctgagataggtgcctcactgattaagcattggtaactgtcagaccaagtttactcatatatactttagattgatttaaaacttcatttttaatttaaaaggatctaggtgaagatcctttttgataatctcatgaccaaaatcccttaacgtgagttttcgttccactgagcgtcagaccccgtagaaaagatcaaaggatcttcttgagatcctttttttctgcgcgtaatctgctgcttgcaaacaaaaaaaccaccgctaccagcggtggtttgtttgccggatcaagagctaccaactctttttccgaaggtaactggcttcagcagagcgcagataccaaatactgttcttctagtgtagccgtagttaggccaccacttcaagaactctgtagcaccgcctacatacctcgctctgctaatcctgttaccagtggctgctgccagtggcgataagtcgtgtcttaccgggttggactcaagacgatagttaccggataaggcgcagcggtcgggctgaacggggggttcgtgcacacagcccagcttggagcgaacgacctacaccgaactgagatacctacagcgtgagctatgagaaagcgccacgcttcccgaagggagaaaggcggacaggtatccggtaagcggcagggtcggaacaggagagcgcacgagggagcttccagggggaaacgcctggtatctttatagtcctgtcgggtttcgccacctctgacttgagcgtcgatttttgtgatgctcgtcaggggggcggagcctatggaaaaacgccagcaacgcggcctttttacggttcctggccttttgctggccttttgctcacatgttctttcctgcgttatcccctgattctgtggataaccgtattaccgcctttgagtgagctgataccgctcgccgcagccgaacgaccgagcgcagcgagtcagtgagcgaggaagcggaagagcgcccaatacgcaaaccgcctctccccgcgcgttggccgattcattaatgcagctggcacgacaggtttcccgactggaaagcgggcagtgagcgcaacgcaattaatgtgagttagctcactcattaggcaccccaggctttacactttatgcttccggctcgtatgttgtgtggaattgtgagcggataacaatttcacacaggaaacagctatgaccatgattacgccaagcttgcatgcctgcaggcagctgcgcgctcgctcgctcactgaggccgcccgggcgtcgggcgacctttggtcgcccggcctcagtgagcgagcgagcgcgcagagagggagtggccaactccatcactaggggttcctggaggggtggagtcgtgacgtaaagatctgatatcatcgatcgcgatgcattaattaagcggccgaggctcagaggcacacaggagtttctgggctcaccctgcccccttccaacccctcagttcccatcctccagcagctgtttgtgtgctgcctctgaagtccacactgaacaaacttcagcctactcatgtccctaaaatgggcaaacattgcaagcagcaaacagcaaacacacagccctccctgcctgctgaccttggagctggggcagaggtcagagacctctctgggcccatgccacctccaacatccactcgaccccttggaatttcggtggagaggagcagaggttgtcctggcgtggtttaggtagtgtgagaggggtacccggggatcttgctaccagtggaacagccactaaggattctgcagtgagagcagagggccagctaagtggtactctcccagagactgtctgactcacgccaccccctccaccttggacacaggacgctgtggtttctgagccaggtacaatgactcctttcggtaagtgcagtggaagctgtacactgcccaggcaaagcgtccgggcagcgtaggcgggcgactcagatcccagccagtggacttagcccctgtttgctcctccgataactggggtgaccttggttaatattcaccagcagcctcccccgttgcccctctggatccactgcttaaatacggacgaggacagggccctgtctcctcagcttcaggcaccaccactgacctgggacagtgaatgatccccctgatctgcggcctcgacggtatcgataagcttgatatcgaattctagtcgtcgaccactttcacaatctgctagcaaaggttgccaccatgcagcgcgtgaacatgatcatggcagaatcaccaggcctcatcaccatctgccttttaggatatctactcagtgctgaatgtacaggtttgtttccttttttaaaatacattgagtatgcttgccttttagatatagaaatatctgatgctgtcttcttcactaaattttgattacatgatttgacagcaatattgaagagtctaacagccagcacgcaggttggtaagtactggttctttgttagctaggttttcttcttcttcatttttaaaactaaatagatcgacaatgcttatgatgcatttatgtttaataaacactgttcagttcatgatttggtcatgtaattcctgttagaaaacattcatctccttggtttaaaaaaattaaaagtgggaaaacaaagaaatagcagaatatagtgaaaaaaaataaccacattatttttgtttggacttaccactttgaaatcaaaatgggaaacaaaagcacaaacaatggccttatttacacaaaaagtctgattttaagatatatgacatttcaaggtttcagaagtatgtaatgaggtgtgtctctaattttttaaattatatatcttcaatttaaagttttagttaaaacataaagattaacctttcattagcaagctgttagttatcaccaaagcttttcatggattaggaaaaaatcattttgtctctatgtcaaacatcttggagttgatatttggggaaacacaatactcagttgagttccctaggggagaaaagcaagcttaagaattgacataaagagtaggaagttagctaatgcaacatatatcactttgttttttcacaactacagtgactttatgtatttcccagaggaaggcatacagggaagaaattatcccatttggacaaacagcatgttctcacaggaagcatttatcacacttacttgtcaactttctagaatcaaatctagtagctgacagtaccaggatcaggggtgccaaccctaagcacccccagaaagctgactggccctgtggttcccactccagacatgatgtcagctgtgaaatcgacgtcgctggaccataattaggcttctgttcttcaggagacatttgttcaaagtcatttgggcaaccatattctgaaaacagcccagccagggtgatggatcactttgcaaagatcctcaatgagctattttcaagtgatgacaaagtgtgaagttaaccgctcatttgagaactttctttttcatccaaagtaaattcaaatatgattagaaatctgaccttttattactggaattctcttgactaaaagtaaaattgaattttaattcctaaatctccatgtgtatacagtactgtgggaacatcacagattttggctccatgccctaaagagaaattggctttcagattatttggattaaaaacaaagactttcttaagagatgtaaaattttcatgatgttttcttttttgctaaaactaaagaattattcttttacatttcagtttttcttgaccatgagaatgccaacaagatcttgaacaggcccaagagatacaactcaggaaagctggaagagtttgtgcaggggaacctggagagagaatgcatggaagaaaagtgctcctttgaggaagccagagaagtgtttgaaaacactgagagaaccactgagttctggaaacaatatgtggatggggaccagtgtgaaagcaacccctgcctcaatggaggctcctgcaaagatgacattaactcctatgagtgctggtgcccttttggctttgaagggaagaactgtgaattggatgtcacttgcaacatcaagaatgggagatgtgaacagttctgcaagaactcagctgacaacaaggtggtctgctcctgcactgaagggtacaggctggcagagaaccaaaaatcctgtgaaccagcagtgcccttcccttgtgggagggtgtcagtcagccaaacctccaagctgactagggctgaaactgtgttccctgatgtggactatgtcaacagcactgaggctgaaacaattctggacaacatcacccagagcacccagtcctttaatgacttcaccagagtggtgggaggagaggatgccaagcctggccagttcccttggcaagtggtgctgaatggaaaagtggatgccttctgtggtggatccattgtcaatgagaaatggattgtgactgctgcccactgtgtggagactggagtcaagatcacagtggtggcaggagagcacaacattgaggaaactgagcacactgagcagaagaggaatgtcattaggatcatcccccaccacaactacaatgctgccattaacaagtacaaccatgacattgccctgcttgaactggatgagcctctggtcctcaactcctatgtgacccccatctgcattgctgacaaggagtacaccaacatcttcctcaagtttggctcaggatatgtgtcaggctggggcagagtgttccacaaaggctactcagccttggtgctgcaatacctgagagtgcccctggtggacagagccacctgtttggaatccactaagttcaggatctacaacaacatgttctgtgctggcttccatgagggtggaagagactcctgccagggagactctggtggtccccatgtcactgaagtggaaggaacctcattcctcactggcatcatcagctggggtgaagagtgtgccatgaaggggaagtatggcatctacaccaaggtgtccagatatgtgaactggatcaaggaaaagaccaagctgacctaatgaaagatggatttccaaggttaattcattggaattgaaaattaacagccccccccccccccccctgcagatctcgagccgaattcctgcagcccgggggatcagcctcgactgtgccttctagttgccagccatctgttgtttgcccctcccccgtgccttccttgaccctggaaggtgccactcccactgtcctttcctaataaaatgaggaaattgcatcgcattgtctgagtaggtgtcattctattctggggggtggggtggggcaggacagcaagggggaggattgggaagacaatagcaggcatgctggggatgcggtgggctctatggcttctgaggcggaaagaaccagctggggctcgagatccactagactagtgtacacgcgtgatatcagatctgttacgtagataagtagcatggcgggttaatcattaactacaaggaacccctagtgatggagttggccactccctctctgcgcgctcgctcgctcactgaggccgggcgaccaaaggtcgcccgacgcccgggctttgcccgggcggcctcagtgagcgagcgagcgcgcagctgcctgcaggtcgactctagaggatccccgggtaccgagctcgaattcactggccgtcgttttacaacgtcgtgactgggaaaaccctggcgttacccaacttaatcgccttgcagcacatccccctttcgccagctggcgtaatagcgaagaggcccgcaccgatcgcccttcccaacagttgcgcagcctgaatggcgaatggcgcctgatgcggtattttctccttacgcatctgtgcggtatttcacaccgcatacgtcaaagcaaccatagtacgcgccctgtagcggcgcattaagcgcggcgggtgtggtggttacgcgcagcgtgaccgctacacttgccagcgcttagcgcccgctcctttcgctttcttcccttcctttctcgccacgttcgccggctttccccgtcaagctctaaatcgggggctccctttagggttccgatttagtgctttacggcacctcgaccccaaaaaacttgatttgggtgatggttcacgtagtgggccatcgccctgatagacggtttttcgccctttgacgttggagtccacgttctttaatagtggactcttgttccaaactggaacaacactcaactctatctcgggctattcttttgatttataagggattttgccgatttcggtctattggttaaaaaatgagctgatttaacaaaaatttaacgcgaattttaacaaaatattaacgtttacaattttatggtgcactctcagtacaatctgctctgatgccgcatagttaagccagccccgacacccgccaacacccgctgacgcgccctgacgggcttgtctgctcccggcatccgcttacagacaagctgtgaccgtctccgggagctgcatgtgtcagaggttttcaccgtcatcaccgaaacgcgcgagacgaaagggcctcgtgatacgcctatttttataggttaatgtcatgataataatggtttcttagacgtcaggtggcacttttcggggaaatgtgcgcggaacccctatttgtttatttttctaaatacattcaaatatgtatccgctcatgagacaataaccctgataaatgcttcaataatattgaaaaaggaagagtatgagtattcaacatttccgtgtcgcccttattcccttttttgcggcattttgccttcctgtttttgctcacccagaaacgctggtgaaagtaaaagatgctgaagatcagttgggtgcacgagtgggttacatcgaactggatctcaacagcggtaagatccttgagagttttcgccccgaagaacgttttccaatgatgagcacttttaaagttctgctatgtggcgcggtattatcccgtattgacgccgggcaagagcaactcggtcgccgcatacactattctcagaatgacttggttgagtactcaccagtcacagaaaagcatcttacggatggcatgacagtaagagaattatgcagtgctgccataaccatgagtgataacactgcggccaacttacttctgacaacgatcggaggaccgaaggagctaaccgcttttttgcacaacatgg

SEQ ID NO: 575 - DNA, 7585 bp, Artificial Sequence
  AAV-hFIX (R318Y/R338E/T343R) optimized
  repeat_region (1597)...(1715): ITR
  enhancer (1781)...(2101): ApoE/C1
  promoter (2111)...(2503): huSerpin A antitrypsin liver specific promoter (partial)
  misc_feature (2598)...(2603): kozak
  sig_peptide (2604)...(2687): FIX signal sequence
  misc_feature (2688)...(2690): FIX propeptide sequence
  intron (2691)...(4128): FIX partial intron 1
  misc_feature (4129)...(4179): FIX propeptide sequence
  misc_feature (4180)...(5424): FIX Zymogen
  polyA_signal (5539)...(5763): bovine growth hormone polyadenylation signal
  repeat_region (5877)...(6006): ITR
gggatcatgtaactcgccttgatcgttgggaaccggagctgaatgaagccataccaaacgacgagcgtgacaccacgatgcctgtagcaatggcaacaacgttgcgcaaactattaactggcgaactacttactctagcttcccggcaacaattaatagactggatggaggcggataaagttgcaggaccacttctgcgctcggcccttccggctggctggtttattgctgataaatctggagccggtgagcgtgggtctcgcggtatcattgcagcactggggccagatggtaagccctcccgtatcgtagttatctacacgacggggagtcaggcaactatggatgaacgaaatagacagatcgctgagataggtgcctcactgattaagcattggtaactgtcagaccaagtttactcatatatactttagattgatttaaaacttcatttttaatttaaaaggatctaggtgaagatcctttttgataatctcatgaccaaaatcccttaacgtgagttttcgttccactgagcgtcagaccccgtagaaaagatcaaaggatcttcttgagatcctttttttctgcgcgtaatctgctgcttgcaaacaaaaaaaccaccgctaccagcggtggtttgtttgccggatcaagagctaccaactctttttccgaaggtaactggcttcagcagagcgcagataccaaatactgttcttctagtgtagccgtagttaggccaccacttcaagaactctgtagcaccgcctacatacctcgctctgctaatcctgttaccagtggctgctgccagtggcgataagtcgtgtcttaccgggttggactcaagacgatagttaccggataaggcgcagcggtcgggctgaacggggggttcgtgcacacagcccagcttggagcgaacgacctacaccgaactgagatacctacagcgtgagctatgagaaagcgccacgcttcccgaagggagaaaggcggacaggtatccggtaagcggcagggtcggaacaggagagcgcacgagggagcttccagggggaaacgcctggtatctttatagtcctgtcgggtttcgccacctctgacttgagcgtcgatttttgtgatgctcgtcaggggggcggagcctatggaaaaacgccagcaacgcggcctttttacggttcctggccttttgctggccttttgctcacatgttctttcctgcgttatcccctgattctgtggataaccgtattaccgcctttgagtgagctgataccgctcgccgcagccgaacgaccgagcgcagcgagtcagtgagcgaggaagcggaagagcgcccaatacgcaaaccgcctctccccgcgcgttggccgattcattaatgcagctggcacgacaggtttcccgactggaaagcgggcagtgagcgcaacgcaattaatgtgagttagctcactcattaggcaccccaggctttacactttatgcttccggctcgtatgttgtgtggaattgtgagcggataacaatttcacacaggaaacagctatgaccatgattacgccaagcttgcatgcctgcaggcagctgcgcgctcgctcgctcactgaggccgcccgggcgtcgggcgacctttggtcgcccggcctcagtgagcgagcgagcgcgcagagagggagtggccaactccatcactaggggttcctggaggggtggagtcgtgacgtaaagatctgatatcatcgatcgcgatgcattaattaagcggccgaggctcagaggcacacaggagtttctgggctcaccctgcccccttccaacccctcagttcccatcctccagcagctgtttgtgtgctgcctctgaagtccacactgaacaaacttcagcctactcatgtccctaaaatgggcaaacattgcaagcagcaaacagcaaacacacagccctccctgcctgctgaccttggagctggggcagaggtcagagacctctctgggcccatgccacctccaacatccactcgaccccttggaatttcggtggagaggagcagaggttgtcctggcgtggtttaggtagtgtgagaggggtacccggggatcttgctaccagtggaacagccactaaggattctgcagtgagagcagagggccagctaagtggtactctcccagagactgtctgactcacgccaccccctccaccttggacacaggacgctgtggtttctgagccaggtacaatgactcctttcggtaagtgcagtggaagctgtacactgcccaggcaaagcgtccgggcagcgtaggcgggcgactcagatcccagccagtggacttagcccctgtttgctcctccgataactggggtgaccttggttaatattcaccagcagcctcccccgttgcccctctggatccactgcttaaatacggacgaggacagggccctgtctcctcagcttcaggcaccaccactgacctgggacagtgaatgatccccctgatctgcggcctcgacggtatcgataagcttgatatcgaattctagtcgtcgaccactttcacaatctgctagcaaaggttgccaccatgcagcgcgtgaacatgatcatggcagaatcaccaggcctcatcaccatctgccttttaggatatctactcagtgctgaatgtacaggtttgtttccttttttaaaatacattgagtatgcttgccttttagatatagaaatatctgatgctgtcttcttcactaaattttgattacatgatttgacagcaatattgaagagtctaacagccagcacgcaggttggtaagtactggttctttgttagctaggttttcttcttcttcatttttaaaactaaatagatcgacaatgcttatgatgcatttatgtttaataaacactgttcagttcatgatttggtcatgtaattcctgttagaaaacattcatctccttggtttaaaaaaattaaaagtgggaaaacaaagaaatagcagaatatagtgaaaaaaaataaccacattatttttgtttggacttaccactttgaaatcaaaatgggaaacaaaagcacaaacaatggccttatttacacaaaaagtctgattttaagatatatgacatttcaaggtttcagaagtatgtaatgaggtgtgtctctaattttttaaattatatatcttcaatttaaagttttagttaaaacataaagattaacctttcattagcaagctgttagttatcaccaaagcttttcatggattaggaaaaaatcattttgtctctatgtcaaacatcttggagttgatatttggggaaacacaatactcagttgagttccctaggggagaaaagcaagcttaagaattgacataaagagtaggaagttagctaatgcaacatatatcactttgttttttcacaactacagtgactttatgtatttcccagaggaaggcatacagggaagaaattatcccatttggacaaacagcatgttctcacaggaagcatttatcacacttacttgtcaactttctagaatcaaatctagtagctgacagtaccaggatcaggggtgccaaccctaagcacccccagaaagctgactggccctgtggttcccactccagacatgatgtcagctgtgaaatcgacgtcgctggaccataattaggcttctgttcttcaggagacatttgttcaaagtcatttgggcaaccatattctgaaaacagcccagccagggtgatggatcactttgcaaagatcctcaatgagctattttcaagtgatgacaaagtgtgaagttaaccgctcatttgagaactttctttttcatccaaagtaaattcaaatatgattagaaatctgaccttttattactggaattctcttgactaaaagtaaaattgaattttaattcctaaatctccatgtgtatacagtactgtgggaacatcacagattttggctccatgccctaaagagaaattggctttcagattatttggattaaaaacaaagactttcttaagagatgtaaaattttcatgatgttttcttttttgctaaaactaaagaattattcttttacatttcagtttttcttgatcatgaaaatgccaacaaaattctgaataggccaaagaggtataattcaggcaaattggaagagtttgtgcaagggaaccttgagagagaatgtatggaagaaaagtgtagttttgaagaagcaagggaagtgtttgaaaacactgaaagaacaactgaattttggaagcagtatgttgatggagatcagtgtgagtccaatccatgtttaaatggaggcagttgcaaggatgacattaattcctatgaatgttggtgtccctttggatttgaaggaaagaactgtgaattagatgtaacatgtaacattaagaatggcagatgtgagcagttttgtaaaaatagtgctgataacaaggtggtttgctcctgtactgagggatataggcttgcagaaaaccagaagtcctgtgaaccagcagtgccatttccatgtggaagagtgtctgtgtcacaaacttctaagctcaccagagctgagactgtttttcctgatgtggactatgtaaattctactgaagctgaaaccattttggataacatcactcaaagcacccaatcatttaatgacttcactagagttgtgggtggagaagatgccaagccaggtcaattcccttggcaagttgttttgaatggtaaagttgatgcattctgtggaggctctattgttaatgaaaaatggattgtaactgctgcccactgtgttgaaactggtgttaaaattacagtggtggcaggggaacataatattgaggagacagaacatacagagcaaaagaggaatgtgattagaattattcctcaccacaactacaatgcagctattaataagtacaaccatgacattgcccttctggaactggatgaacccttagtgctaaacagctatgttacacctatttgcattgctgacaaggaatacaccaacatcttcctcaaatttggatctggctatgtaagtggctggggaagagtgttccacaaagggtattcagctttagttcttcagtaccttagagtgccacttgttgacagagccacatgtcttgaatctacaaagttcagaatctataacaacatgttctgtgctggcttccatgaaggaggtagagattcatgtcaaggagatagtgggggaccccatgttactgaagtggaaggaaccagtttcttaactggaattattagctggggtgaagagtgtgcaatgaaaggcaaatatggaatatataccaaggtatccagatatgtcaactggattaaggaaaaaacaaagctcacttaatgaaagatggatttccaaggttaattcattggaattgaaaattaacagccccccccccccccccctgcagatctcgagccgaattcctgcagcccgggggatcagcctcgactgtgccttctagttgccagccatctgttgtttgcccctcccccgtgccttccttgaccctggaaggtgccactcccactgtcctttcctaataaaatgaggaaattgcatcgcattgtctgagtaggtgtcattctattctggggggtggggtggggcaggacagcaagggggaggattgggaagacaatagcaggcatgctggggatgcggtgggctctatggcttctgaggcggaaagaaccagctggggctcgagatccactagactagtgtacacgcgtgatatcagatctgttacgtagataagtagcatggcgggttaatcattaactacaaggaacccctagtgatggagttggccactccctctctgcgcgctcgctcgctcactgaggccgggcgaccaaaggtcgcccgacgcccgggctttgcccgggcggcctcagtgagcgagcgagcgcgcagctgcctgcaggtcgactctagaggatccccgggtaccgagctcgaattcactggccgtcgttttacaacgtcgtgactgggaaaaccctggcgttacccaacttaatcgccttgcagcacatccccctttcgccagctggcgtaatagcgaagaggcccgcaccgatcgcccttcccaacagttgcgcagcctgaatggcgaatggcgcctgatgcggtattttctccttacgcatctgtgcggtatttcacaccgcatacgtcaaagcaaccatagtacgcgccctgtagcggcgcattaagcgcggcgggtgtggtggttacgcgcagcgtgaccgctacacttgccagcgcttagcgcccgctcctttcgctttcttcccttcctttctcgccacgttcgccggctttccccgtcaagctctaaatcgggggctccctttagggttccgatttagtgctttacggcacctcgaccccaaaaaacttgatttgggtgatggttcacgtagtgggccatcgccctgatagacggtttttcgccctttgacgttggagtccacgttctttaatagtggactcttgttccaaactggaacaacactcaactctatctcgggctattcttttgatttataagggattttgccgatttcggtctattggttaaaaaatgagctgatttaacaaaaatttaacgcgaattttaacaaaatattaacgtttacaattttatggtgcactctcagtacaatctgctctgatgccgcatagttaagccagccccgacacccgccaacacccgctgacgcgccctgacgggcttgtctgctcccggcatccgcttacagacaagctgtgaccgtctccgggagctgcatgtgtcagaggttttcaccgtcatcaccgaaacgcgcgagacgaaagggcctcgtgatacgcctatttttataggttaatgtcatgataataatggtttcttagacgtcaggtggcacttttcggggaaatgtgcgcggaacccctatttgtttatttttctaaatacattcaaatatgtatccgctcatgagacaataaccctgataaatgcttcaataatattgaaaaaggaagagtatgagtattcaacatttccgtgtcgcccttattcccttttttgcggcattttgccttcctgtttttgctcacccagaaacgctggtgaaagtaaaagatgctgaagatcagttgggtgcacgagtgggttacatcgaactggatctcaacagcggtaagatccttgagagttttcgccccgaagaacgttttccaatgatgagcacttttaaagttctgctatgtggcgcggtattatcccgtattgacgccgggcaagagcaactcggtcgccgcatacactattctcagaatgacttggttgagtactcaccagtcacagaaaagcatcttacggatggcatgacagtaagagaattatgcagtgctgccataaccatgagtgataacactgcggccaacttacttctgacaacgatcggaggaccgaaggagctaaccgcttttttgcacaacatgg
